(19) United States
(12) Patent Application Publication
(10) Pub. No.: US 2025/0011363 A1
(43) Pub. Date: Jan. 9, 2025

(54) OPTIMIZED SHORTENED PEPTIDE THAT BINDS TO ACETYLCHOLINE RECEPTOR, AND USE THEREOF

(71) Applicant: SKINMED CO., LTD., Daejeon (KR)

(72) Inventors: Sung Hyun KIM, Sejong (KR); Jin Ho BANG, Cheongju-si, Chungcheongbuk-do (KR); Jeung Hoon LEE, Daejeon (KR); Min Ho LEE, Daejeon (KR); Yong Chul SHIN, Jinju-si, Gyeongsangnam-do (KR); Won Il CHOI, Seoul (KR)

(73) Assignee: SKINMED CO., LTD., Daejeon (KR)

(21) Appl. No.: 18/292,696

(22) PCT Filed: Jul. 27, 2022
(86) PCT No.: PCT/KR2022/011078

§ 371 Date: Jan. 26, 2024

(30) Foreign Application Priority Data
Jul. 27, 2021 (KR) 10-2021-0098837
Jul. 26, 2022 (KR) 10-2022-0092749

(51) Int. Cl. C07K 7/06; A61K 8/64; A61K 38/08; A61Q 19/08

(52) U.S. Cl. CPC C07K 7/06; A61K 8/64; A61K 38/08; A61Q 19/08

(57) ABSTRACT

The present disclosure relates to an optimized shortened peptide that binds to an acetylcholine receptor, and a use thereof. It is expected that it is possible to develop a cosmetic composition for alleviating wrinkles, pharmaceuticals for preventing or treating acetylcholine receptor-related diseases, and health functional foods for improvement of the acetylcholine receptor-related diseases, by using the optimized shortened peptide of the present disclosure, which is shorter than conventional acetylcholine receptor inhibitory peptides but has a high acetylcholine receptor binding force and an acetylcholine receptor inhibitory effect.

### TECHNICAL FIELD

[0001] The present disclosure relates to an acetylcholine receptor-binding optimized shortened peptide and a use thereof. More specifically, the present disclosure relates to an acetylcholine receptor-binding, optimized shortened peptide expressed in a certain manner for the optimization of peptides, which inhibits the function of the acetylcholine receptor by binding thereto, and a use thereof.

### BACKGROUND ART

[0002] Acetylcholine is a chemical substance present in the nervous tissue of animals, secreted at the nerve endings, and plays a role in transmitting nerve stimulation to muscles. The transmitter substances secreted from nerve endings include acetylcholine in motor and parasympathetic nerves and epinephrine (adrenaline) in sympathetic nerves. When acetylcholine is secreted, it exhibits physiological actions such as lowering blood pressure, inhibiting heartbeats, contracting intestines, and contracting skeletal muscles. For muscles to contract, nerves have to command muscles to contract at the junction where nerves and muscles meet (neuromuscular junction), where nerves secrete acetylcholine, and this substance binds to the acetylcholine receptors on the muscles, enabling muscle contraction (Vincent, A., 1985; Lindstrom, J. M., et al., 1976). Blocking the peripheral acetylcholine receptors that dominate the femoral skeletal muscles causes paralysis of muscle movement, and blocking the acetylcholine receptors of smooth muscles and cardiac muscles responsible for breathing or heart movements leads to paralysis of breathing or heart movements.

[0003] Acetylcholine receptors are classified into muscarinic acetylcholine receptors (mAchR) and nicotinic acetylcholine receptors (nAchR). Muscarinic acetylcholine receptors are G protein-coupled receptors that can be activated by muscarine and activate different signaling mechanisms depending on the subtype. They are distributed all over the body, including the central nervous system and peripheral organs, mainly mediating the physiological actions of acetylcholine secreted from postganglionic fibers of the parasympathetic nervous system.

[0004] Nicotinic acetylcholine receptors are receptors that mimic the pharmacological actions caused by nicotine and are ion channels manipulated by neurotransmitters. They non-selectively allow the passage of ions such as sodium, potassium, and calcium through the opening and closing of ion channels, regulating electronic signaling between nerve and muscle cells. Nicotinic acetylcholine receptors can be divided into muscle type and neuronal type based on the expression site. Muscle-type nicotinic acetylcholine receptors are expressed at the neuromuscular junction where motor neurons meet skeletal muscles and contribute to inducing end plate potential (EPP) in skeletal muscle cell membranes when acetylcholine is secreted from motor neurons. Meanwhile, neuronal-type nicotinic acetylcholine receptors are expressed in peripheral ganglia of the autonomic nervous system (ANS) and contribute to exciting postganglionic fibers by acetylcholine secreted from preganglionic fibers.

[0005] Drugs that interfere or inhibit the activity of acetylcholine or mimic its actions are being used very effectively. Acetylcholine receptor agonists are used to treat severe myasthenia gravis and Alzheimer's disease. In the case of severe myasthenia gravis, it is an autoimmune disease caused by the body producing antibodies against nicotinic acetylcholine receptors, inhibiting normal acetylcholine signal transmission. Using acetylcholine esterase (AChE) inhibitors can increase the time each receptor can interact with acetylcholine in the synaptic gap between nerve and muscle before inactivation of the acetylcholine, thus treating severe myasthenia gravis.

[0006] Moreover, interference with the secretion of acetylcholine can inhibit muscle contraction, causing paralysis of muscles and smoothing wrinkles; this is utilized in Botox. Botox blocks the process of acetylcholine secretion, which is essential for muscle contraction at the motor nerve terminals. As a result, muscles become immobile, and wrinkles caused by muscles disappear. The muscle-relaxing effect of Botox gradually fades after 3-6 weeks, necessitating repeated administrations.

[0007] Furthermore, cosmetic peptides have been developed using the mechanism of smoothing wrinkles by inhibiting the binding of acetylcholine to its receptors. An example is Synake by DSM, a snake venom-derived peptide, known among wrinkle-improving peptides for having the best clinical effect (approximately 52%) and is widely used as an ingredient in peptide cosmetics.

[0008] The inventors, while researching acetylcholine receptor-binding peptides, screened and secured peptides with high binding affinity to the acetylcholine receptors. They confirmed that these peptides inhibit acetylcholine binding by binding to the acetylcholine receptors, thus inhibiting acetylcholine receptor action. However, as acetylcholine receptor-binding peptides were provided as peptide fragments, there were issues such as increased manufacturing costs with longer peptides and reduced skin permeability when manufactured as cosmetics. Consequently, there was a need for research on more shortened peptides while maintaining high binding affinity to the acetylcholine receptors.

[0009] As prior art, Korean Patent No. 10-2020-0080179 A issued to the present inventors discloses acetylcholine receptor inhibitory peptides and uses thereof. Still, only 8mer, 11mer, 14mer, and 18mer peptides are listed for acetylcholine receptor inhibitory peptides, and the optimized shortened peptides of the present disclosure and their effects are not mentioned. Also, Korean Patent No. 1216008 discloses acetylcholine receptor-binding peptides selected using biopanning, but does not include the peptide and library containing the amino acid sequence of the present disclosure.

[0010] Moreover, Korean Patent No. 2018-0028748 A describes a peptide regulating the release of neurotransmitters including acetylcholine, and the effect thereof on reducing wrinkles, but does not disclose the binding affinity of peptides containing the amino acid sequence of the present disclosure to acetylcholine receptors and the resulting inhibition of acetylcholine receptor action. Korean Patent No. 2014-0139010 A mentions a peptide for enhancing transdermal penetration but differs in composition and effect from the action-inhibiting peptide through acetylcholine receptor binding of the present disclosure.

### DISCLOSURE OF INVENTION

### Technical Problem

[0011] The present disclosure aims primarily to provide an optimized shortened peptide that binds to an acetylcholine receptor. Additionally, the present disclosure is to provide an optimized shortened peptide that binds to acetylcholine receptors.

[0012] In addition, the present disclosure aims to provide a cosmetic composition for wrinkle reduction, containing an optimized shortened peptide that binds to an acetylcholine receptor. Furthermore, the present disclosure is to provide a composition for preventing or treating diseases related to excessive activity of acetylcholine receptors, containing an optimized shortened peptide that binds to an acetylcholine receptor.

[0013] The present disclosure aims to provide a health functional food composition and a medical device composition for alleviating diseases related to excessive activity of acetylcholine receptors, each containing an optimized shortened peptide that bind to an acetylcholine receptor.

### Solution to Problem

[0014] To accomplish the tasks, the present disclosure provides an optimized shortened peptide that binds to an acetylcholine receptor.

[0015] As used herein, the term “amino acid” or “any amino acid” encompasses both natural amino acids and other amino acids, such as non-natural amino acids, amino acids not encoded by genetic sequences, including both L- and D-isomers, used in the synthesis of peptides in the field of peptides.

[0016] The natural amino acids may be alanine (Ala, A), cysteine (Cys, C), aspartic acid (Asp, D), glutamic acid (Glu, E), phenylalanine (Phe, F), glycine (Gly, G), histidine (His, H), isoleucine (Ile, I), lysine (Lys, K), leucine (Leu, L), methionine (Met, M), asparagine (Asn, N), proline (Pro, P), glutamine (Gln, Q), arginine (Arg, R), serine (Ser, S), threonine (Thr, T), valine (Val, V), tryptophan (Trp, W), and tyrosine (Tyr, Y).

[0017] The other amino acids include a wide variety of modified or unusual amino acids, examples of which include 2-aminoadipic acid (2-aminohexanedioic acid), α-asparagine, 2-aminobutanoic acid, 2-aminocapric acid (2-aminodecanoic acid), α-glutamine, α-aminoisobutyric acid (α-methylalanine), 2-aminopimelic acid (2-aminohepanedioic acid), γ-amino-β-hydroxybenzenepentanoic acid, 2-aminosuberic acid (2-aminooctanedioic acid), 2-carboxyazetidine, β-alanine, β-aspartic acid, 3,6-diaminohexanoic acid (β-lysine), butanoic acid, 4-amino-3-hydroxybutanoic acid, γ-amino-β-hydroxycyclohexanepentanoic acid, 3-cyclohexylalanine, N5-aminocarbonylornithine, 3-sulfoalanine, 2,3-diaminopropioic acid, 2,7-diaminosuberic acid (2,7-diaminooctanedioic acid), S-ethylthiocysteine, γ-glutamic acid, γ-carboxylglutamic acid, hydroxyacetic acid (glycolic acid), pyroglutamic acid, homogrginine, homocysteine, homohistidine, 2-hydroxyisovaleric acid, homoserine, 2-hydroxypentanoic acid, 5-hydroxylysine, 4-hydroxyproline, isovaline, 2-hydroxypropanoic acid (lactic acid), mercaptoacetic acid, mercaptobutanoic acid, 3-hydroxy-4-methylproline, mercaptopropanoic acid, 3-naphthylalanine, norleucine, nortyrosine, norvaline, 2-carboxyoctahydroindole, ornithine, penicillamine (3-mercaptovaline), 2-phenylglycine, 2-carboxypiperidine, sarcosine (N-methylglycine), 1-amino-1-carboxycyclopentane, statin (4-amino-3-hydroxy-6-methylheptanoic acid), 3-thienylalanine, 3-carboxyisoquinoline, 3-methylvaline, ε-N-trimethyllysine, 3-thiazolylalanine, α-amino-2,4-dioxopyrimidinepropanoic acid, etc.

[0018] As used herein, the “peptide” refers to a polymer made up of two or more amino acids linked by amide or peptide bonds.

[0019] In the present disclosure, “acetylcholine receptor” (AchR) refers to a receptor that binds to acetylcholine secreted from nerve endings, acting as a pathway for transmitting stimulation by acetylcholine. For example, when a muscle needs to contract, the nerve tells the muscle to contract, and the nerve secretes acetylcholine at the neuromuscular junction. When the secreted acetylcholine binds to the acetylcholine receptor in the muscle, the muscle contracts.

[0020] The acetylcholine receptors in the present disclosure are classified into muscarinic acetylcholine receptors and nicotinic acetylcholine receptors, with nicotinic acetylcholine receptors being preferred in the present disclosure.

[0021] The present disclosure provides an acetylcholine receptor-binding peptide consisting of the amino acid sequence represented by the following Chemical Formula 1.

(R/K)XXX(R/K) [Chemical Formula 1]

[0022] (wherein R/K is arginine or lysine, X is any amino acid)

[0023] The peptide consists of a sequence of five amino acids, where the first and fifth amino acids are each arginine or lysine, and the second, third, and fourth amino acids are any amino acids.

[0024] The acetylcholine receptor-binding peptide consists of a sequence of five amino acids as expressed in [Chemical Formula 1], where the 1^{st} and 5^{th} amino acids, K or R, may be critical for binding to acetylcholine receptors. In the amino acid sequence represented by Chemical Formula 1, each of the 2^{nd}, 3^{rd}, and 4^{th} amino acids may be any amino acid. This indicates that provided that the 1^{st} and 5^{th} amino acids are K or R, the peptide can still show a certain level of acetylcholine receptor binding capacity even though the 2^{nd}, 3^{rd}, and 4^{th} amino acids change.

[0025] The present disclosure provides an acetylcholine receptor-binding peptide consisting of the amino acid sequence represented by the following Chemical Formula 1-1.

(R/K)XYZ(R/K) [Chemical Formula 1-1]

[0026] (wherein R/K represents either arginine or lysine, and XYZ represents a sequence of any three consecutive amino acids, with X being an amino acid selected from R, Q, G, V, L, S, and W, Y being an amino acid selected from R, Q, L, I, F, V, and Y, and Z being an amino acid selected from R, S, L, C, Y, Q, and T)

[0027] The amino acid sequence represented by Chemical Formula 1-1 may be selected from the group consisting of the amino acid sequences of SEQ ID NOS: 1 to 600.

[0028] The present disclosure also provides an acetylcholine receptor-binding peptide consisting of the amino acid sequence represented by the following Chemical Formula 1-2.

XRRQRR [Chemical Formula 1-2]

[0029] (wherein R represents arginine, Q represents glutamine, and X represents any one amino acid).

[0030] The amino acid sequence represented by Chemical Formula 1-2 may be selected from the group consisting of the amino acid sequences of SEQ ID NOS: 3601 to 3620.

[0031] The present disclosure further provides an acetylcholine receptor-binding peptide consisting of the amino acid sequence represented by the following Chemical Formula 1-3.

RRQRRX [Chemical Formula 1-3]

[0032] (Wherein R represents arginine, Q represents glutamine, and X represents any one amino acid)

[0033] The amino acid sequence represented by Chemical Formula 1-3 may be selected from the group consisting of the amino acid sequences of SEQ ID NOS: 3621 to 3640.

[0034] The present disclosure also provides an acetylcholine receptor-binding peptide consisting of the amino acid sequence represented by the following Chemical Formula 2.

(R/K)(R/K)XXX(R/K) [Chemical Formula 2]

[0035] (Wherein R/K represents either arginine or lysine, and X represents any one amino acid)

[0036] The acetylcholine receptor-binding peptide includes a sequence of 6 amino acids as expressed in Chemical Formula 2, where the 1^{st}, 2^{nd}, and 6^{th} amino acids, each being K or R, may be critical for binding to acetylcholine receptors. In the amino acid sequence represented by Chemical Formula 2, each of the 3^{rd}, 4^{th}, and 5^{th} amino acids may be any amino acid. This indicates that provided that the 1^{st}, 2^{nd}, and 6^{th} amino acids are K or R, the peptide can still show a certain level of acetylcholine receptor binding capacity even though the 3^{rd}, 4^{th}, and 5^{th} amino acids change.

[0037] The present disclosure provides an acetylcholine receptor-binding peptide consisting of the amino acid sequence represented by the following Chemical Formula 2-1.

(R/K)(R/K)XYZ(R/K) [Chemical Formula 2-1]

[0038] (wherein R/K represents either arginine or lysine, XYZ represents a sequence of any three consecutive amino acids, with X being an amino acid selected from R, Q, G, V, L, S, and W, Y being an amino acid selected from R, Q, L, I, F, V, and Y, and Z being an amino acid selected from R, S, L, C, Y, Q, and T)

[0039] The amino acid sequence represented by Chemical Formula 2-1 may be selected from the group consisting of the amino acid sequences of SEQ ID NOS: 1201 to 1800.

[0040] The present disclosure provides an acetylcholine receptor-binding peptide consisting of the amino acid sequence represented by the following Chemical Formula 2-2.

XRRGVRR [Chemical Formula 2-2]

[0041] (wherein R represents arginine, G represents glycine, V represents valine, and X represents any one amino acid)

[0042] The amino acid sequence represented by Chemical Formula 2-2 may be selected from the group consisting of the amino acid sequences of SEQ ID NOS: 3641 to 3660.

[0043] The present disclosure provides an acetylcholine receptor-binding peptide consisting of the amino acid sequence represented by the following Chemical Formula 2-3.

RRGVRRX [Chemical Formula 2-3]

[0044] (wherein R represents arginine, G represents glycine, V represents valine, and X represents any one amino acid)

[0045] The amino acid sequence represented by Chemical Formula 2-3 may be selected from the group consisting of the amino acid sequences of SEQ ID NOS: 3661 to 3680.

[0046] The present disclosure provides an acetylcholine receptor-binding peptide consisting of the amino acid sequence represented by the following Chemical Formula 3.

(R/K)XXX(R/K)(R/K) [Chemical Formula 3]

[0047] (wherein R/K represents either arginine or lysine, and X represents any one amino acid)

[0048] The acetylcholine receptor-binding peptide consists of a sequence of 6 amino acids as expressed in Chemical Formula 3, where 1^{st}, 5^{th}, and 6^{th} amino acids, each being K or R, may be critical for binding to acetylcholine receptors. In the amino acid sequence represented by Chemical Formula 3, each of the 2^{nd}, 3^{rd}, and 4^{th} amino acids may be any amino acid. This indicates that provided that the 1^{st}, 5^{th}, and 6^{th} amino acids are K or R, the peptide can still show a certain level of acetylcholine receptor binding capacity even though the 2^{nd}, 3^{rd}, and 4^{th} amino acids change.

[0049] The present disclosure provides an acetylcholine receptor-binding peptide consisting of the amino acid sequence represented by the following Chemical Formula 3-1.

(R/K)XYZ(R/K)(R/K) [Chemical Formula 3-1]

[0050] (wherein R/K represents either arginine or lysine, XYZ represents a sequence of any three consecutive amino acids, with X being an amino acid selected from R, Q, G, V, L, S, and W, Y being an amino acid selected from R, Q, L, I, F, V, and Y, and Z being an amino acid selected from R, S, L, C, Y, Q, and T)

[0051] The amino acid sequence represented by Chemical Formula 3-1 may be selected from the group consisting of the amin acid sequences of SEQ ID NOS: 2401 to 3000.

[0052] The amino acid sequence of the acetylcholine receptor-binding peptide excludes the amino acid sequences described in Korean Patent No. 10-2020-0080179 A, which is the prior patent invention to the present disclosure, but includes the amino acid sequence RKSLLR disclosed in Korean Patent No. 10-2020-0080179 A.

[0053] The present disclosure pertains to an acetylcholine receptor-binding peptide with a modification to the N-terminus or C-terminus thereof.

[0054] In the acetylcholine receptor-binding peptide, the modification to the N-terminus or C-terminus may be palmitoylation, acetylation, formylation, PEGylation, or conjugation with 2-mercaptoacetic acid, 3-mercaptopropionic acid, 6-mercaptohexanoic acid, pyroglutamic acid, succinimide acid, amide, cystramine, methyl ester, ethyl ester, benzyl ester, or a fatty acid, such as at least one selected from the group consisting of myristic acid, stearic acid, palmitic acid, cholesterol, 6-amino hexanoic acid, and 8-amino octanoic acid.

[0055] The peptides of the present disclosure can be obtained through widely known methods in the field. Specifically, the peptides can be manufactured using genetic recombination and protein expression systems, or synthesized in vitro through chemical synthesis methods, including cell-free protein synthesis. More specifically, they can be synthesized using an automatic peptide synthesizer or produced using gene manipulation techniques, but are not limited to thereto. For example, a gene encoding a fusion protein comprising a fusion partner and the peptide of the present disclosure can be constructed by genetic manipulation, and the constructed gene can be transformed into a host microorganism. The fusion protein can then be expressed in the host microorganism, and the peptide of the present disclosure can be cleaved and separated from the fusion protein using proteolytic enzymes or compounds to produce the desired peptide.

[0056] The peptide of the present disclosure may exist in a salt form. Salt forms available in the present disclosure can be formed during the final isolation and purification of the compound or by reacting the amino groups with an appropriate acid. For example, salts may include acetate, adipate, alginate, citrate, aspartate, benzoate, benzene sulfonate, bisulfate, butyrate, camphorate, camphorsulfonate, digluconate, glycerophosphate, hemisulfate, heptanoate, hexanoate, formate, fumarate, hydrochloride, hydrobromide, hydroiodide, 2-hydroxyethanesulfonate, lactate, maleate, methanesulfonate, naphthalenesulfonate, nicotinate, 2-naphthalenesulfonate, oxalate, pamoate, pectinate, persulfate, 3-phenylpropionate, picrate, pivalate, propionate, succinate, tartrate, trichloroacetate, trifluoroacetate, phosphate, glutamate, bicarbonate, para-toluenesulfonate, undecanoate, and more but are not limited thereto. Additionally, the acids used to form acid addition salts may include inorganic acids such as hydrochloric acid, hydrobromic acid, sulfuric acid, and phosphoric acid, and organic acids such as oxalic acid, malic acid, succinic acid, and citric acid, but are not limited to thereto.

[0057] With respect to the peptides, their N- or C-termini may be modified by adding a targeting sequence, a tag, a labeled residue, or an amino acid sequence designed for increasing the stability or half-life of the peptides; an antibody or an antibody fragment thereof, human serum albumin (HSA), and the like designed for increasing targeting efficacy or stability.

[0058] The term “antibody” refers to a specific protein molecule that is directed to an antigenic site. Preferably, the antibody refers to an antibody that specifically binds to a specific protein or an immunogenic fragment thereof, and may include all of monoclonal antibodies (mAb), polyclonal antibodies (pAb), and recombinant antibodies. The antibody may be easily produced using a known technique widely known in the art.

[0059] The antibody may include a complete form having two full-length light chains and two full-length heavy chains as well as a functional fragment of an antibody molecule. The functional fragment of the antibody molecule refers to a fragment retaining at least an antigen-binding function, and includes Fab, F(ab′), F(ab′)₂, F(ab)₂, Fv, and the like.

[0060] The peptides may be encapsulated or immobilized in nanoparticles, microparticles, metal particles, ceramic particles, hydrogels, and the like, for delivery to specific tissues or to ensure stability, but are not limited thereto.

[0061] The nanoparticles, microparticles, metal particles, ceramic particles, hydrogels, and the like may be biocompatible and non-toxic.

[0062] The acetylcholine receptor-binding peptides bind to acetylcholine receptors, thereby preventing the binding of acetylcholine to the receptors, and thus can inhibit the actions of the acetylcholine receptors. Preferably, the peptides can relieve wrinkles and suppress abnormal muscle contraction by inhibiting muscle contraction; and, during surgery, can secure the convenience of surgery by promoting muscle relaxation.

[0063] Furthermore, the present disclosure provides a polynucleotide encoding the acetylcholine receptor-binding peptide. A polynucleotide containing a nucleotide sequence that is homologous to the nucleotide sequence constituting the polynucleotide may also be included in the scope of the polynucleotide provided in the present disclosure as long as the polynucleotide can encode a peptide capable of exhibiting binding activity to the acetylcholine receptor. Such a polynucleotide is preferably a polynucleotide containing an amino acid sequence showing at least 80% homology, more preferably a polynucleotide containing an amino acid sequence showing at least 90% homology, and most preferably a polynucleotide containing an amino acid sequence showing at least 95% homology.

[0064] Furthermore, the present disclosure provides a cosmetic composition, for wrinkle relief, including the acetylcholine receptor peptide.

[0065] The acetylcholine receptor-binding peptide can relieve wrinkles by inhibiting the action of the acetylcholine receptor to prevent muscle contraction.

[0066] The cosmetic composition may further contain the acetylcholine receptor-binding peptide, and an adjuvant commonly used in the field of cosmetics, for example, a hydrophilic or lipophilic gelling agent, a hydrophilic or lipophilic activator, a preservative, an antioxidant, a solvent, a flavoring agent, a filler, a blocker, a pigment, a deodorant, or a dye.

[0067] The amount of the adjuvant is an amount that is commonly used in the art and, in any case, the adjuvant and the proportion thereof may be for selected so as not to adversely affect desirable properties of the cosmetic composition according to the present disclosure.

[0068] The cosmetic composition for wrinkle relief may be prepared by further containing an additive.

[0069] The additive may be a moisturizer, a functional raw material, a thickener, a softener, an emulsifier, a surfactant, a pH adjuster, and the like.

[0070] The moisturizer may include glycerin, propylene glycol, butylene glycol, hyaluronic acid, a ceramide component, and the like, but is not limited thereto.

[0071] The thickener may include a polymer, xanthan gum, and guar gum, but is not limited thereto.

[0072] The softener may include mineral oil, shea butter, or paraffin, but is not limited thereto.

[0073] The emulsifier may include dimethicone, beeswax, and the like.

[0074] The cosmetic composition for wrinkle relief may be used by mixing with a raw material having a wrinkle relief effect.

[0075] The raw material having a wrinkle relief effect may include vitamin A, a vitamin A derivative (retinyl palmitate, retinyl acetate, etc.), adenosine, and polyethoxylated retinamide, but is not limited thereto.

[0076] The cosmetic composition may be in the formulation of at least one selected from the group consisting of a lotion, a skin softener, a skin toner, an astringent, a cream, a foundation, an essence, a pack, a mask pack, a soap, a body cleanser, a cleansing foam, a body oil, and a body lotion, but is not limited thereto.

[0077] The cosmetic composition may be used every day, and may also be used even for an undetermined period, and preferably, the amount of use, the number of times of use, and the period of the cosmetic composition may be adjusted according to user's age, skin condition, or skin type.

[0078] Furthermore, the present disclosure provides a pharmaceutical composition for prevention or treatment of an acetylcholine receptor hyperactivity-associated disease, the pharmaceutical composition containing the acetylcholine receptor-binding peptide.

[0079] The pharmaceutical composition can bind to an acetylcholine receptor to inhibit the activation of the acetylcholine receptor, thereby preventing or treating the acetylcholine receptor hyperactivity-associated disease.

[0080] The acetylcholine receptor hyperactivity-associated disease refers to a disease in which the muscle contracts abnormally excessively, and examples thereof may be cervical dystonia, limb dystonia, truncal dystonia, blepharospasm, spasticity, hemifacial spasm, strabismus, nystagmus, tics, chronic pain, chronic migraine, neurogenic bladder, detrusor-sphincter dyssynergia, achalasia cardia, hyperhidrosis, neuropathic pain, skin wrinkles, square jaw and sialorrhea, pediatric cerebral palsy, post-stroke muscle stiffness, back pain, enlarged prostate, urinary incontinence, vocal cord nodules and correction, hemorrhoids, dentition, and the like.

[0081] In addition, the pharmaceutical composition can be used to secure the convenience of surgery by promoting muscle relaxation during surgery, and can be used as a therapeutic agent or adjuvant for diseases caused by nicotine addiction, used for wrinkle removal, and used for square jaw or calf correction, but is not limited thereto.

[0082] The pharmaceutical composition may contain the acetylcholine receptor-binding peptide and a pharmaceutically acceptable excipient.

[0083] The pharmaceutical composition may be formulated in the forms of: an oral formulation, such as a powder, granules, a tablet, a capsule, a suspension, an emulsion, a syrup, or an aerosol; an externally applied preparation; a suppository; and a sterile injectable solution, according to usual methods, respectively. Examples of a carrier, an excipient, and a diluent that may be contained in the pharmaceutical composition may include lactose, dextrose, sucrose, sorbitol, mannitol, xylitol, erythritol, maltitol, starch, acacia rubber, alginate, gelatin, calcium phosphate, calcium silicate, cellulose, methyl cellulose, microcrystalline cellulose, polyvinyl pyrrolidone, water, methyl hydroxybenzoate, propyl hydroxybenzoate, talc, magnesium stearate, and mineral oil. The pharmaceutical composition may be prepared by using a diluent or an excipient that is usually used, such as a filler, an extender, a binder, a humectant, a disintegrant, or a surfactant. Solid preparations for oral administration include a tablet, a pill, a powder, granules, a capsule, and the like. These solid preparations may be prepared by mixing the acetylcholine receptor-binding peptide with at least one excipient, for example, starch, calcium carbonate, sucrose or lactose, gelatin, or the like. Also, a lubricant, such as magnesium stearate or talc, may be used in addition to simple excipients. Liquid preparations for oral administration correspond to a suspension, a liquid for internal use, an emulsion, a syrup, and the like, and may contain simple diluents that are frequently used, such as water and liquid paraffin, as well as several excipients, such as a humectant, a sweetener, a flavoring agent, and a preservative. Preparations for parenteral administration include a sterile aqueous solution, a non-aqueous solvent, a suspension, an emulsion, a freeze-drying agent, and a suppository. Examples of the non-aqueous solvent and suspension may include propylene glycol, polyethylene glycol, vegetable oils such as olive oil, injectable esters such as ethyl oleate, and the like. A base material for the suppository may include Witepsol, Macrogol, Tween 61, cocoa butter, laurin butter, glycerogelatin, and the like.

[0084] Although not particularly limited to the formulation, the pharmaceutical composition may be used as an externally-applied preparation for skin, having one formulation selected from an ointment agent, a lotion agent, a spray agent, a patch agent, a cream agent, a gel agent, and a gel. The pharmaceutical composition may contain an agent for increasing transdermal absorption, such as, but not limited to, dimethyl sulfoxide, dimethylacetamide, dimethylformamide, a surfactant, an alcohol, acetone, propylene glycol, or polyethylene glycol. The frequency of application may vary significantly depending on the age, sex, and weight of a subject to be treated, a specific disease or pathological condition to be treated, the severity of a disease or pathological condition, the route of administration, and the judgment of a prescriber. The frequency of application may range from once a month up to 10 times a day, preferably from once a week up to 4 times a day, more preferably from three times a week up to three times a day, still more preferably one or two times a day.

[0085] The pharmaceutical composition of the present disclosure may be administered to mammals, such as a rat, livestock, and a human, through various routes. All modes of administration may be expected, and for example, administration may be conducted orally, rectally, or by intravenous, intramuscular, subcutaneous, transdermal, endometrial, or intracerebrovascular injection. Preferably, administration may be conducted by transdermal injection.

[0086] Furthermore, the present disclosure is directed to a health functional food composition, containing the acetylcholine receptor-binding peptide, for alleviating an acetylcholine receptor hyperactivity-associated disease.

[0087] The health functional food composition may contain the acetylcholine receptor-binding peptide and a sitologically acceptable food supplement additive.

[0088] The health functional food composition of the present disclosure includes forms of a tablet, a capsule, a pill, a liquid preparation, and the like, and examples of foods to which peptide of the present disclosure can be added include various kinds of foods, beverages, gums, teas, vitamin complexes, and health functional foods.

[0089] In accordance with still another aspect of the present disclosure, there is provided a composition for a medicinal device, the composition containing the acetylcholine receptor-binding peptide.

[0090] The composition for a medicinal device may be a filler, but is not limited thereto.

[0091] As used herein, the term “filler” refers to a substance that can supplement skin tissues, and has the purpose of filling through injection for restoration of the resilient face, improvement of facial contour, and relief of wrinkles.

[0092] The composition for a medicinal device can relieve wrinkles by suppressing muscle contraction and can exhibit a contour improving effect, through the acetylcholine receptor-binding peptide, and microparticles, nanoparticles, and hydrogels, on which the acetylcholine receptor-binding peptide is immobilized, can be injected to fill tissue.

### Advantageous Effects of Invention

[0093] The present disclosure relates to acetylcholine receptor-binding optimized shortened peptides and uses thereof and, more specifically, to pentamers and hexamers containing arginine or lysine at both ends and having a certain amino acid sequence XYZ in the center, and further including arginine or lysine at the N or C terminal for the hexamers. Compared to existing longer peptides or existing pentamers and hexamers, the optimized shortened peptides of the present disclosure have significantly improved binding affinity for acetylcholine receptors and enhanced skin permeability. Thus, it is expected that the peptides can be developed into cosmetic compositions for wrinkle reduction, pharmaceuticals for the prevention or treatment of acetylcholine receptor-associated diseases, and health functional foods for health improvement.

### BRIEF DESCRIPTION OF DRAWINGS

[0094] FIG. 1 shows comparison of affinity for acetylcholine receptors among the precursor peptides 11mer and 8mer, and their shortened peptides 6mer, and Synake.

[0095] FIG. 2 shows alanine scanning results to identify the critical sequence of the shortened peptides 6mer and 5mer of Espep2.

[0096] FIG. 3 shows the result of binding affinity for acetylcholine receptors of the shortened peptides 6mer and 5mer derived from Espep2.

[0097] FIG. 4 shows graphs of acetylcholine receptor binding specificity of phages screened through biopanning for the optimized shortened library 6mer-1,6mer-2, and 5mer.

[0098] FIG. 5 is a graph comparing the RU value, which is the binding affinity, between the top XYZ repeating amino acid combination and the bottom XYZ repeating amino acid combination in the 5mer library.

[0099] FIG. 6 is a graph comparing the RU value, which is the binding affinity, between the top XYZ repeating amino acid combination and the bottom XYZ repeating amino acid combination in the 6mer-1 library.

[0100] FIG. 7 is a graph comparing the RU value, which is the binding affinity, between the top XYZ repeating amino acid combination and the bottom XYZ repeating amino acid combination in the 6mer-2 library.

[0101] FIG. 8 shows the result of comparing the binding affinity for acetylcholine receptors among simple 5mer (5mer-ND) and 6mer (Espep2-6mer) derived from Espep2, the control Synake, and the optimized peptides 5mer (5mer-73 and 5mer-311) and 6mer (6mer-1-43,6mer-1-210, 6mer-2-233, and 6mer-2-136) according to the present disclosure.

[0102] FIG. 9 shows the affinity of the 6mer-1-43 peptide according to the present disclosure for acetylcholine receptors over concentration.

[0103] FIG. 10 is a graph showing the inhibitory capacity of Synake on acetylcholine receptors.

[0104] FIG. 11 shows the inhibitory capacity of the 6mer-1-43 and 6mer-1-210 peptides according to the present disclosure on acetylcholine receptors.

[0105] FIG. 12 shows the inhibitory capacity of the 6mer-2-136 and 6mer-2-233 peptides according to the present disclosure on acetylcholine receptors.

[0106] FIG. 13 shows the inhibitory capacity of the 5mer-73 and 5mer-311 peptides according to the present disclosure on acetylcholine receptors.

[0107] FIG. 14 shows the inhibitory capacity of the palmitoylated peptide (Pal-6mer-1-43) of the 6mer-1-43 peptide according to the present disclosure on acetylcholine receptors.

[0108] FIG. 15 is the result of the inhibitory capacity of the palmitoylated 5mer-73 peptide (Pal-5mer-73) according to the present disclosure on acetylcholine receptors.

[0109] FIG. 16 shows comparison of inhibitory capacity on acetylcholine receptors between each peptide according to the present disclosure and Synake.

[0110] FIG. 17 shows results of assaying cytotoxicity of representative peptides according to the present disclosure for cytotoxicity.

[0111] FIG. 18 shows results of assaying skin permeability of the 11mer (Pal-Espep2) as the control group and the 5mer (Pal-5mer-73) according to the present disclosure.

[0112] FIG. 19 shows results of assaying clinical efficacy of the optimized short peptide (5mer-73, RRQRR) according to the present disclosure on eye skin wrinkles.

[0113] FIG. 20 shows results of assaying clinical efficacy of the optimized short peptide (5mer-73, RRQRR) according to the present disclosure on skin elasticity.

[0114] FIG. 21 shows results of assaying clinical efficacy of the optimized short peptide (5mer-73, RRQRR) according to the present disclosure on forehead wrinkle reduction.

### BEST MODE FOR CARRYING OUT THE INVENTION

[0115] The present inventors previously selected acetylcholine receptor (AchR)-specific peptides with high binding affinity and specificity for AchR in the prior patent (Korean Patent No. 10-2020-0080179 A). These peptides were based on the Espep-2 peptide sequence WTWKGRKSLLR and further developed to identify crucial sequence regions important for acetylcholine receptor binding, resulting in the discovery of optimized 8mer, 11mer, and 14mer peptides with increased affinity to AchR. While these peptides demonstrated selective binding affinity to AchR through repeated biopanning, their length of 8-14mers causes problems such as the expensive production costs and difficulty in penetrating the skin. Particularly, as the peptide length increases, it not only leads to higher production costs but also negatively impacts skin penetration.

[0116] To address these issues, the present inventors have developed the invention during the process of identifying shorter peptides that retain selective binding affinity for AchR. Particularly, it was discovered that even the simply shortened 6-mer and 5-mer peptides RKSLLR and KSLLR, derived from Espep2, demonstrated superior binding affinity compared to the Synake peptide. Based on the structure of Espep2, the inventors searched for the optimal peptide structures for 6-mer and 5-mer peptides. To determine the optimized shortened peptides, a random library of 6-mer and 5-mer peptides was generated, screened, and analyzed for the peptide sequences. The results confirmed that peptides with specific amino acid sequences at certain positions exhibited higher acetylcholine receptor binding affinity, compared to the existing Espep2 (11-mer), 6-mer, and 5-mer peptides.

[0117] Hereinafter, preferable exemplary embodiments of the present disclosure will be described in detail. However, the present disclosure is not limited to the exemplary embodiments described herein and can be embodied in many different forms. Rather, these exemplary embodiments are provided so that the present disclosure will be thorough and complete and will fully convey the scope of the disclosure to those skilled in the art.

### Example 1: Affinity of Shortened Peptides for Construction of Optimized Shortened Library

[0118] To construct an optimized shortened library from the previous Espep2 peptide, assessment was made of the affinity of peptides having sequences sequentially removed from the N- and C-terminals. Initially, surface plasmon resonance (SPR) experiments were conducted using a biosensor chip (Biacore3000, Biacore AB, Uppsala, Sweden). Selected acetylcholine receptor proteins were immobilized on a CM5 chip (Biacore) using EDC/NHS and observed for association and dissociation for up to 500 seconds. The observation conditions were set forth as follows: running buffer 20 mM Tris (pH 7.4), rate 30 ul/min, concentration 20 μM (peptide), and the results are depicted in FIG. 1.

[0119] As shown in FIG. 1, the affinity for acetylcholine receptor of the derivatives with reduced size by removing amino acids from the N and C terminals was 1.2 μM for 11mer (Espep2-11mer, WTWKGRKSLLR), 3.1 μM for 8mer (Espep2-8mer, KGRKSLLR), and 57 μM for 6mer (Espep2-6mer, RKSLLR), indicating higher affinity by 1916 times for the 11mer, 740 times for the 8mer, and 40 times for the 6mer, compared to Synake.

[0120] Synake, a snake venom-derived peptide, inhibits the binding of acetylcholine to its receptors, thus relieving wrinkles. The high affinity of the shortened Espep-2 peptides (11mer, 8mer, 6mer) for acetylcholine receptor protein, as seen in FIG. 1, demonstrated superior performance compared to Synake, indicating their potential not only in cosmetic compositions for wrinkle relief, but also in preventing or treating diseases related to acetylcholine receptor hyperactivity by inhibiting the acetylcholine receptor.

[0121] Despite the excellent medical utility of botulinum toxin used in treating various diseases caused by muscle spasms and hyperactivity due to acetylcholine receptor hyperactivity, it possesses a highly toxic nature, capable of causing death to about a million people with just 1 g, and is regulated under the Biological Weapons Convention. In consideration of this fact, short peptides were found to achieve high acetylcholine receptor inhibitory efficacy.

### Example 2: Alanine Scanning and Affinity of Shortened Peptides to Confirm Core Sequence

[0122] To identify the crucial sequences in the shortened peptides, alanine scanning was conducted. Wild-type (WT) Espep2-6mer (RKSLLR) and Espep2-5mer (KSLLR) peptides were synthesized with each amino acid sequentially substituted with alanine (Ala, A), and their affinity was measured using the same method as in Example 1. The measurements are depicted in FIG. 2 after normalization to WT.

[0123] As shown in FIG. 2, it was found that positively charged amino acids near the N and C terminals are important for binding.

[0124] Moreover, among the six amino acids in the RKSLLR sequence, R residues at the N and C terminals are crucial. Based on these results, 5mer-ND (KSLLR) and 5mer-CD (RKSLL) peptides were synthesized by removing one sequence from each end of the N and C terminals of the 6mer, and their respective affinities were measured and the measurements are presented in FIG. 3.

[0125] As shown in FIG. 3, Espep2 6mer had an RU value of 177, indicating higher affinity than that of Synake, and the shortened 5mer-ND showed higher binding affinity than Synake. In the case of 5mer-CD, it exhibited slightly lower binding affinity compared to Synake. Thus, it was found the structure of the 5mer shortened peptide, including lysine (K) or arginine (R) at both ends, is advantageous for acetylcholine receptor binding.

### Example 3: Construction of Library of Shortened, 6Mer-1,6Mer-2,5Mer-ND

[0126] Based on the important sequences identified through alanine scanning in Example 2, optimized libraries were constructed for 6mer-1; (K/R) (K/R) XXX(K/R), 6mer-2; (K/R) XXX(K/R) (K/R), and 5mer-ND; (K/R) XXX(K/R) [(K/R) represents either K or R and X is a random amino acid].

### Example 3-1: Construction of Optimized Shortened Library Vectors

[0127] To construct a 6mer optimized peptide library, DNA sequences for 6mer-1-F(SfiI_ARAARANNKNNKNNKARA_NotI), 6mer-2-F(SfiI_ARANNKNNKNNKARAARA_NotI), 5mer-ND-F(SfiI_ARANNKNNKNNKARA_NotI), and Back (AACAGTTTCTGCGGCCGC) (where N is A, T, G or C; K is G or T; and M is C or A) were synthesized (Bioneer, Daejeon, Korea). With the synthesized DNA library of Table 1 serving as templates, 5mer and 6mer inserts were subjected to PCR (94° C. for 5 min, 60 cycles of 40° C. for 30 sec and 72° C. for 30 sec, and 72° C. for 7 min) to generate double-stranded products, followed by purification (PCR purification kit, GeneAll, Seoul, Korea) to obtain the library genes. The library genes were inserted into a phagemid vector (pIGT). In this regard, the phagemid vector and insert DNA were treated with restriction enzymes. About 10 μg of insert DNA was reacted with Sfil (New England Biolabs (NEB, Ipswich)) and NotI (NEB, Ipswich) for 8 hours, and then the purified DNA was obtained using the PCR purification kit. Similarly, about 10 μg of phagemid vector was treated with Sfil and NotI for 8 hours, followed by reaction with CIAP (Calf Intestinal Alkaline Phosphatase) (NEB, Ipswich) for 1 hour and then purification by the PCR purification kit. The insert DNA was ligated to the phagemid vector using T4 DNA ligase (Bioneer, Daejeon, Korea) for 15 hours at 18° C. and then precipitated with ethanol, and the DNA was dissolved in 100 μL of TE buffer.

TABLE 1

| Library | Amino acid sequence | Base sequence |
|---|---|---|
| 6mer-1 | (K or R)-(K or R)- | TTCTATGCGGCCCA |
| | XXX-(K or R), | GCTGGCCARAARAN |
| | X = random amino | NKNNKNNKARAGCG |
| | acids | GCCGCAGAAACTGT |
| | | T |
| 6mer-2 | (K or R)-XXX- | TTCTATGCGGCCCA |
| | (K or R)-(K or R), | GCTGGCCARANNKN |
| | X = random amino | NKNNKARAARAGCG |
| | acids | GCCGCAGAAACTGT |
| | | T |
| 5mer-ND | (K or R)-XXX- | TTCTATGCGGCCCA |
| | (K or R), | GCTGGCCARANNKN |
| | X = random amino | NKNNKARAGCGGCC |
| | acids | GCAGAAACTGTT |

N: A or C or G or T
K: G or T
R: A or G
X: Random amino acids

### Example 3-2. Electroporation

[0128] The phagemid vector (10 μg) and 6mer or 5mer random insert DNA (3 μg) were ligated in 100 μL which was then divided into 10 parts, followed by electroporation. Competent cells were thawed on ice, and 200 μL of competent cells were mixed with 4 μL of the ligated solution, cooled, and placed in a prepared 0.2 cm cuvette which was then left on ice for 1 minute. After an electroporator (BioRAD, Hercules, Ca) was programmed under conditions of 25 μF and 2.5 kV at 200 $2, the prepared cuvette was dried and placed in the electroporator and a pulse was applied thereto. The time constant was 4.5-5 msec. Immediately thereafter, the cells were transferred to 1 mL of LB broth containing 20 mM glucose prewarmed to 37° C., and the resulting 25 mL of cells were transferred to a 100-mL tube and then cultured at 37° C. at 200 rpm for one hour. Of the cell culture, 10 μL was taken, diluted, and spread on an ampicillin agar plate to count the library. The remaining cells were cultured overnight in 1 L of LB with 20 mM glucose and 50 μg/mL ampicillin at 30° C. After centrifugation for 20 minutes at 4,000 g and 4° C., the supernatant was discarded and the cell pellet was resuspended in 40 mL of LB. Then, glycerol was added to a final concentration of more than 20%, and stored at −80° C.

### Example 3-3: Production of Recombinant Phage from Optimized Peptide Library

[0129] Recombinant phages were produced using the 6mer and 5mer optimized peptide library stored at −80° C. To 30 mL of SB broth was added 1 mL of the library stored at −80° C., followed by incubation at 37° C. and 200 rpm for 20 minutes. Helper phage (1010 pfu) and ampicillin (final concentration 50 μg/mL) were added and cultured again under the same conditions for an hour. Then, the phages were transferred to 30 mL of SB broth containing ampicillin (50 μg/mL) and kanamycin (10 μg/mL) and cultured under the same conditions for over 16 hours to produce recombinant phages. The culture was centrifuged at 5,000 rpm for 10 minutes at 4° C., and the supernatant was mixed with PEG/NaCl in a 5:1 ratio, left on ice for 1 hour, then centrifuged at 13,000 rpm for 20 minutes at 4° C. The supernatant was carefully discarded and the pellet was resuspended in 1 mL of PBS.

[0130] To ensure that all possible amino acid sequences were stochastically included in the library, the completed library number should be at least 3.2×104 for the 5mer optimized library, calculated as 2×2×20×20×20. Therefore, the 5mer library was constructed with a count of 1.95×106 in this study. For the 6mer optimized library, the number should be at least 6.4×104, calculated as 2×2×2×20×20×20. In this study, 1.23×106 and 1.53×106 libraries were obtained for 6mer-1 and 6mer-2, respectively, confirming successful library development. These results are summarized in Table 2 below. Additionally, partial sequencing of each library confirmed no errors in the designated sequence, and the results are given in Table 3.

TABLE 2

| | | | Sequence and |
|---|---|---|---|
| | | | No. of |
| | | Se- | optimized |
| | Name | quence | library |
| 1 | Espep 2_ | RKSLLR | (R/K)(R/K) |
| | 6mer-1 | | XXX(R/K) |
| | | | 1.23 × 106 |
| 2 | Espep 2_ | | KSLLR(R/K)(R/K) |
| | 6mer-2 | | XXX(R/K)(R/K) |
| | | | 1.53 × 106 |
| 3 | Espep 2_5mer | KSLLR | (R/K)XXX(R/K) |
| | (ND) | | 1.95 × 106 |

TABLE 3

| No. | Name | Sequence |
|---|---|---|
| 1 | 5mer-ND-1 | AAQLAKGCCRAAAEQKLISEEDLSR@DDDD |
| 2 | 5mer-ND-2 | AAQLARVVRRAAAEQKLISEEDLSR@DDDD |
| 3 | 5mer-ND-3 | AAQLAKWILKAAAEQKLISEEDLSR@DDDD |
| 4 | 5mer-ND-4 | AAQLAKSTCKAAAEQKLISEEDLSR@DDDD |
| 5 | 5mer-ND-5 | AAQLARSVQRAAAEQKLISEEDLSR@DDDD |
| 6 | 5mer-ND-6 | AAQLAKAQQRAAAEQKLISEEDLSR@DDDD |
| 7 | 5mer-ND-7 | AAQLARGLWKAAAEQKLISEEDLSR@DDDD |
| 8 | 5mer-ND-8 | AAQLARTDERAAAEQKLISEEDLSR@DDDD |
| 9 | 5mer-ND-9 | AAQLAKCYARAAAEQKLISEEDLSR@DDDD |
| 10 | 5mer-ND-10 | AAQLARKGTRAAAEQKLISEEDLSR@DDDD |
| 11 | 6mer-1-1 | AAQLARRGRGRAAAEQKLISEEDLSR@DDDD |
| 12 | 6mer-1-2 | AAQLARKALLRAAAEQKLISEEDLSR@DDDD |
| 13 | 6mer-1-3 | AAQLAKRQCSKAAAEQKLISEEDLSR@DDDD |
| 14 | 6mer-1-4 | AAQLARRCSRRAAAEQKLISEEDLSR@DDDD |
| 15 | 6mer-1-5 | AAQLARRRGYRAAAEQKLISEEDLSR@DDDD |
| 16 | 6mer-1-6 | AAQLAKRCVRRAAAEQKLISEEDLSR@DDDD |
| 17 | 6mer-1-7 | AAQLARKQLGKAAAEQKLISEEDLSR@DDDD |
| 18 | 6mer-1-8 | AAQLAKKSTTRAAAEQKLISEEDLSR@DDDD |
| 19 | 6mer-1-9 | AAQLARRQAQKAAAEQKLISEEDLSR@DDDD |
| 20 | 6mer-1-10 | AAQLAKRVSQRAAAEQKLISEEDLSR@DDDD |
| 21 | 6mer-2-1 | AAQLAKQLRKKAAAEQKLISEEDLSR@DDDD |
| 22 | 6mer-2-2 | AAQLAKRQLKRAAAEQKLISEEDLSR@DDDD |
| 23 | 6mer-2-3 | AAQLAKLSLRRAAAEQKLISEEDLSR@DDDD |
| 24 | 6mer-2-4 | AAQLARLVSRRAAAEQKLISEEDLSR@DDDD |
| 25 | 6mer-2-5 | AAQLAKVQLKKAAAEQKLISEEDLSR@DDDD |
| 26 | 6mer-2-6 | AAQLAKRFQKKAAAEQKLISEEDLSR@DDDD |
| 27 | 6mer-2-7 | AAQLAKSFRRKAAAEQKLISEEDLSR@DDDD |
| 28 | 6mer-2-8 | AAQLARVESKKAAAEQKLISEEDLSR@DDDD |
| 29 | 6mer-2-9 | AAQLAKGLLKKAAAEQKLISEEDLSR@DDDD |
| 30 | 6mer-2-10 | AAQLAKSYYKRAAAEQKLISEEDLSR@DDDD |

### Example 4: Biopanning and Screening of Shortened Peptide Library

### Example 4-1: Biopanning

[0131] A procedure in which immobilized antigens were treated with a phage library surface-expressing antibodies to thereby antibody candidates binding to the antigens is called biopanning, and the biopanning is composed of three steps; binding/washing/elution. The phages having antibodies with weak binding affinity were removed during a washing step, and resultantly, only phages expressing antibodies with strong binding affinity remained. This procedure can be repeated to discover antibody candidates with excellent antigen binding affinity and specificity. Therefore, biopanning was used to screen acetylcholine receptor-binding peptides with excellent binding affinity and specificity to acetylcholine receptors.

[0132] In eight wells of a 96-well plate, 5 μg/ml AchR al was placed at 50 μl per well, and then left overnight at 4° C. Next day, the wells were washed once with 200 μl of Tris (20 mM, pH 7), followed by the addition of 200 μl of 2% bovine serum albumin (BSA), and then blocked at room temperature for 2 hours. Then, the solution was all discarded, and the wells were washed three times with 200 μl of Tris (20 mM, pH 7). After 400 μl of the random peptide recombinant phages (input phages) suspended in PBS in Example 3-3 was mixed with 400 μl of 2% BSA, the mixture was placed at 100 μl per well and then left at 30° C. for 1 hour. The solution in the wells was all removed, and the wells were washed three times with Tris (20 mM, pH 7). Thereafter, 0.2 M glycine (pH 2.2) was placed at 100 μl per well, and the phages were isolated for 20 minutes, and then, the phages were collected in one tube and added with 200 μl of 1 M Tris (pH 9.0) to obtain output phages.

[0133] To repeat biopanning, 500 μl of the isolated phages were mixed with 5 ml of E. coli, followed by incubation at 37° C. and 200 rpm for 30 minutes. Then, 1×1010 pfu helper phages and ampicillin were added to a final concentration of 50 μg/ml before additional incubation for 30 minutes. The culture was transferred to SB broth containing 50 μg/ml ampicillin and 10 μg/ml kanamycin, and cultured overnight in the same conditions, thereby reproducing random peptide recombinant phages. The reproduced random peptide recombinant phages were centrifuged at 4° C. and 5,000 rpm for 10 minutes. The supernatant thus obtained and PEG/NaCl were mixed at 5:1 (v: v), left on ice for 1 hour, and centrifuged at 4° C. and 13,000 rpm for 20 minutes. The supernatant was discarded while the precipitate was suspended in 1 ml of phosphate buffered saline (PBS), and used for a subsequent round of biopanning.

[0134] Random recombinant phages were reproduced in the same manner as in the foregoing, with the exception that the washing was 3, 3, 4, 4, 5, and 6 times repeated (0.05% PBST) as the round of biopanning increased.

[0135] To measure the number of input phages and output phages for each biopanning, the phages were mixed with E. coli having an absorbance at 600 nm of 0.7 (OD600-0.7), and plated on agar plates containing ampicillin. The results are summarized in Tables 4-6 below.

TABLE 4
6mer-1 Biopanning

| Round | No. of wash | Input phage | Output phage | Input/output |
|---|---|---|---|---|
| 1st | 3 | 9.6 × 1010 | 2.3 × 107 | 23.9 × 10−5 |
| 2nd | 3 | 1.98 × 1012 | 1.98 × 108 | 10 × 10−5 |
| 3rd | 4 | 1.63 × 1012 | 5.8 × 107 | 3.55 × 10−5 |
| 4th | 4 | 3.77 × 1012 | 5.28 × 108 | 14 × 10−5 |
| 5th | 5 | 4.07 × 1012 | 7.2 × 108 | 17.6 × 10−5 |
| 6th | 6 | 3.13 × 1012 | 6.4 × 108 | 20.4 × 10−5 |

TABLE 5
6mer-2 Biopanning

| Round | No. of wash | Input phage | Output phage | Input/output |
|---|---|---|---|---|
| 1st | 3 | 4.57 × 1011 | 1.45 × 108 | 31.7 × 10−5 |
| 2nd | 3 | 2.17 × 1012 | 5.23 × 108 | 24.1 × 10−5 |
| 3rd | 4 | 0.61 × 1012 | 5.1 × 107 | 8.36 × 10−5 |
| 4th | 4 | 5.21 × 1012 | 7.7 × 108 | 14.7 × 10−5 |
| 5th | 5 | 4.01 × 1012 | 6.27 × 108 | 15.6 × 10−5 |
| 6th | 6 | 3.87 × 1012 | 6.51 × 108 | 16.82 × 10−5 |

TABLE 6
5mer-ND Biopanning

| Round | No. of wash | Input phage | Output phage | Input/output |
|---|---|---|---|---|
| 1st | 3 | 8.88 × 1011 | 3 × 108 | 33.7 × 10−5 |
| 2nd | 3 | 5.36 × 1011 | 1.09 × 108 | 20.33 × 10−5 |
| 3rd | 4 | 1.58 × 1012 | 9 × 106 | 0.56 × 10−5 |
| 4th | 4 | 3.55 × 1012 | 1.23 × 109 | 34.64 × 10−5 |
| 5th | 5 | 3.12 × 1012 | 1.54 × 109 | 49.35 × 10−5 |
| 6th | 6 | 2.83 × 1012 | 1.25 × 109 | 44.16 × 10−5 |

### Example 4-2. Enzyme-Linked Immunosorbent Assay (ELISA) Using Random Peptide Library Input Recombinant Phages

[0136] ELISA was performed on bovine serum albumin (BSA) and AchR using the input phages for each round of biopanning in Example 4-1.

[0137] In a 96-well ELISA plate, 10 μg/ml AchR or BSA was added at 50 μl per well, and left overnight at 4° C. The next day, the wells were washed thrice with Tris (20 mM, pH7), followed by the addition of 2% BSA diluted with PBS, and then blocked at room temperature for 2 hours. After the solution was discarded, the wells were washed thrice with Tris (20 mM, pH7). After 800 μl of the input pages for each of 1^{st}, 2^{nd}, 3^{rd}, 4^{th}, 5^{th}, and 6^{th} rounds in Tables 4 to 6 in Example 4-1 were mixed with 200 μl of 10% BSA, the mixture was placed at 100 μl per well and then left at 30° C. for 1 hour. The solution in the wells was all removed, and the wells were washed thrice with Tris (20 mM, pH 7). Then, horseradish peroxidase (HRP)-conjugated anti-M13 Ab (GE Healthcare) diluted 1:1,000 was added at 100 μl per well, followed by incubation at 30° C. for 1 hour. After the wells were washed thrice with Tris (20 mM, pH 7), 100 μl of a tetramethylbenzidine (TMB) solution, which is a substrate of HRP, was added to each well to induce a color development reaction, and then the reaction was stopped by the addition of 100 μl of 1M HCl, and the absorbance (OD450) was measured at 450 nm. The results are depicted in FIG. 4. As shown in FIG. 4, with the increasing of the round of biopanning, the OD value of acetylcholine/BSA increases, indicating that phages with high specificity for the acetylcholine receptor were successfully screened.

### Example 5. Analysis of Amino Acid X in Each Library Peptide

[0138] Following biopanning, an analysis was conducted to determine if specific amino acids, associated with the random sequence XXX in the middle part of the peptide sequence from each library, could be identified as having high binding affinity for the acetylcholine receptor. The sequences of phages from the 6^{th} round of biopanning, which exhibited high specificity from the libraries in Example 4, were analyzed. It was noted that both 5mer and 6mer peptides showed a high frequency of certain amino acids. Labeling the XXX portion sequentially as XYZ, the individual occurrences of amino acids at the positions of X, Y, and Z for peptides with high repetition are presented in Table 7.

TABLE 7

| X | No. of | Y | No. of | Z | No. of |
|---|---|---|---|---|---|
| position | repetition | position | repetition | position | repetition |
| R | 189 | R | 179 | R | 182 |
| Q | 151 | Q | 111 | S | 117 |
| G | 109 | L | 107 | L | 104 |
| V | 96 | I | 96 | C | 78 |
| L | 87 | F | 86 | Y | 65 |
| S | 75 | V | 75 | Q | 64 |
| W | 74 | Y | 75 | T | 61 |
| F | 23 | P | 24 | W | 24 |
| T | 12 | G | 13 | G | 13 |
| M | 12 | W | 13 | V | 13 |
| Y | 11 | H | 12 | I | 13 |
| A | 11 | C | 12 | P | 13 |
| C | 11 | T | 11 | K | 12 |
| N | 11 | M | 11 | F | 12 |
| Y | 11 | S | 11 | H | 12 |
| K | 11 | D | 11 | A | 11 |
| | | A | 11 | N | 11 |
| | | | | D | 11 |

[0139] Specifically, amino acids found to occur much more frequently than other amino acids were: seven amino acids R, Q, G, V, L, S, and W for the position X; seven amino acids R, Q, L, I, F, V, and Y for position Y; and seven amino acids R, S, L, C, Q, T, and Y for position Z.

### Example 6: Binding Affinity Analysis of Peptides Composed of Top 7 Amino Acids in Repeated Sequence of XYZ

[0140] Based on the frequencies of occurrence of the top 7 amino acids from Table 7 in Example 5, 600 peptides comprising these amino acids (top combinations) and those comprising the 13 less frequently occurring amino acids (bottom combinations) were synthesized for each series of 5mer, 6mer-1, and 6mer-2. The binding affinity of each sequence for the acetylcholine receptor was measured using Surface Plasmon Resonance (SPR) analysis method. The binding affinity was measured in terms of Resonance Units (Ru), and the results are summarized in Tables 8-13. The peptides were tested at a concentration of 10 μM. Additionally, the average binding affinities of the top and bottom combinations in each series are depicted in FIGS. 5-7.

TABLE 8
5mer Top sequence

| SEQ | Unique | | Binding | SEQ | Unique | | Binding |
|---|---|---|---|---|---|---|---|
| ID NO: | No. | Sequence | affinity | ID NO: | No. | Sequence | affinity |
| 1 | 5mer-1 | RVQCK | 54 | 301 | 5mer-301 | KWIRK | 64 |
| 2 | 5mer-2 | KRISR | 80 | 302 | 5mer-302 | RRILK | 70 |
| 3 | 5mer-3 | KRVLK | 66 | 303 | 5mer-303 | KGRYR | 87 |
| 4 | 5mer-4 | KRFLR | 58 | 304 | 5mer-304 | RSVRK | 76 |
| 5 | 5mer-5 | KLFLR | 54 | 305 | 5mer-305 | KRICK | 72 |
| 6 | 5mer-6 | RWQQK | 61 | 306 | 5mer-306 | KSYYR | 74 |
| 7 | 5mer-7 | RQLTK | 54 | 307 | 5mer-307 | KQRCK | 82 |
| 8 | 5mer-8 | RQRSR | 51 | 308 | 5mer-308 | RLRCR | 84 |
| 9 | 5mer-9 | RGVQR | 77 | 309 | 5mer-309 | KVQYR | 70 |
| 10 | 5mer-10 | RVQRR | 55 | 310 | 5mer-310 | KSRQR | 78 |
| 11 | 5mer-11 | KQRLR | 84 | 311 | 5mer-311 | RSYSR | 167 |
| 12 | 5mer-12 | RVFLR | 70 | 312 | 5mer-312 | KRYCR | 81 |
| 13 | 5mer-13 | RLISK | 52 | 313 | 5mer-313 | RSQLK | 75 |
| 14 | 5mer-14 | RWLCK | 63 | 314 | 5mer-314 | RWYTR | 80 |
| 15 | 5mer-15 | KGVCK | 75 | 315 | 5mer-315 | KLFSR | 77 |
| 16 | 5mer-16 | KLYTK | 66 | 316 | 5mer-316 | KQYLR | 73 |
| 17 | 5mer-17 | KRIYK | 70 | 317 | 5mer-317 | RRVQR | 86 |
| 18 | 5mer-18 | RQLRR | 69 | 318 | 5mer-318 | KRVCK | 64 |
| 19 | 5mer-19 | KRFQR | 72 | 319 | 5mer-319 | RVQTR | 74 |
| 20 | 5mer-20 | RGRYK | 78 | 320 | 5mer-320 | RVVQR | 75 |
| 21 | 5mer-21 | KWFTR | 63 | 321 | 5mer-321 | RSLSR | 68 |
| 22 | 5mer-22 | RQQLK | 66 | 322 | 5mer-322 | RRQSR | 84 |
| 23 | 5mer-23 | KWLYK | 86 | 323 | 5mer-323 | KWYYR | 77 |
| 24 | 5mer-24 | KSQCR | 67 | 324 | 5mer-324 | KSQRR | 58 |
| 25 | 5mer-25 | KVVYK | 60 | 325 | 5mer-325 | KRIQR | 50 |
| 26 | 5mer-26 | RQQQR | 65 | 326 | 5mer-326 | RRFTK | 68 |
| 27 | 5mer-27 | KGYLR | 67 | 327 | 5mer-327 | RVLCR | 86 |
| 28 | 5mer-28 | RLLSR | 74 | 328 | 5mer-328 | RWVLK | 61 |
| 29 | 5mer-29 | KGFCR | 63 | 329 | 5mer-329 | RRFCR | 79 |
| 30 | 5mer-30 | KSQLR | 70 | 330 | 5mer-330 | RWQLR | 86 |
| 31 | 5mer-31 | RRLQR | 65 | 331 | 5mer-331 | RGIQR | 79 |
| 32 | 5mer-32 | RQLSR | 75 | 332 | 5mer-332 | RRYCR | 85 |
| 33 | 5mer-33 | RRISK | 59 | 333 | 5mer-333 | RVLQR | 67 |
| 34 | 5mer-34 | KRIRK | 82 | 334 | 5mer-334 | KRFYK | 64 |
| 35 | 5mer-35 | RWQYK | 80 | 335 | 5mer-335 | KSLTR | 56 |
| 36 | 5mer-36 | RRLQK | 60 | 336 | 5mer-336 | KSVSR | 83 |
| 37 | 5mer-37 | RRLSR | 72 | 337 | 5mer-337 | KGRSR | 67 |
| 38 | 5mer-38 | RGYCK | 53 | 338 | 5mer-338 | RWILR | 61 |
| 39 | 5mer-39 | KQVSR | 67 | 339 | 5mer-339 | KWVRK | 87 |
| 40 | 5mer-40 | KSVCR | 67 | 340 | 5mer-340 | KGYRR | 51 |
| 41 | 5mer-41 | KVISK | 82 | 341 | 5mer-341 | RWYRR | 52 |
| 42 | 5mer-42 | RQRLR | 83 | 342 | 5mer-342 | KVYQR | 69 |
| 43 | 5mer-43 | KSFYR | 53 | 343 | 5mer-343 | KSFSR | 60 |
| 44 | 5mer-44 | RSRTR | 59 | 344 | 5mer-344 | KQFQR | 52 |
| 45 | 5mer-45 | RVFQR | 86 | 345 | 5mer-345 | RQQRR | 86 |
| 46 | 5mer-46 | KRQCK | 76 | 346 | 5mer-346 | KGISK | 57 |
| 47 | 5mer-47 | KGVRR | 70 | 347 | 5mer-347 | KRICR | 78 |
| 48 | 5mer-48 | RVYLR | 62 | 348 | 5mer-348 | KRQTK | 80 |
| 49 | 5mer-49 | KWRTR | 62 | 349 | 5mer-349 | KQVYR | 50 |
| 50 | 5mer-50 | KLLCR | 63 | 350 | 5mer-350 | KSYYK | 59 |
| 51 | 5mer-51 | RSLQR | 70 | 351 | 5mer-351 | KSFSK | 75 |
| 52 | 5mer-52 | RQQYK | 50 | 352 | 5mer-352 | RLVRK | 76 |
| 53 | 5mer-53 | RLVTR | 50 | 353 | 5mer-353 | KSQLK | 59 |
| 54 | 5mer-54 | KWLQR | 66 | 354 | 5mer-354 | RSQTR | 64 |
| 55 | 5mer-55 | RRFSR | 58 | 355 | 5mer-355 | KLLYR | 87 |
| 56 | 5mer-56 | KRFCK | 59 | 356 | 5mer-356 | KQVLR | 65 |
| 57 | 5mer-57 | KQLYR | 73 | 357 | 5mer-357 | RGFRK | 54 |
| 58 | 5mer-58 | KWVSK | 75 | 358 | 5mer-358 | KVRSK | 50 |
| 59 | 5mer-59 | KLQYR | 68 | 359 | 5mer-359 | KRFQK | 79 |
| 60 | 5mer-60 | RLFTK | 86 | 360 | 5mer-360 | RQLCK | 66 |
| 61 | 5mer-61 | RLILK | 66 | 361 | 5mer-361 | RSYQR | 58 |
| 62 | 5mer-62 | KQLTK | 70 | 362 | 5mer-362 | KQRLK | 62 |
| 63 | 5mer-63 | RLLRK | 86 | 363 | 5mer-363 | KRVRK | 59 |
| 64 | 5mer-64 | KVVTR | 76 | 364 | 5mer-364 | RWITR | 62 |
| 65 | 5mer-65 | RQIRR | 67 | 365 | 5mer-365 | KRRYK | 52 |
| 66 | 5mer-66 | KRLLR | 80 | 366 | 5mer-366 | RQLQK | 52 |
| 67 | 5mer-67 | RQLYR | 86 | 367 | 5mer-367 | RSVQK | 71 |
| 68 | 5mer-68 | RGFYK | 82 | 368 | 5mer-368 | KRIRR | 50 |
| 69 | 5mer-69 | RSRSR | 50 | 369 | 5mer-369 | RGFTR | 84 |
| 70 | 5mer-70 | RLLQR | 69 | 370 | 5mer-370 | KWRRK | 67 |
| 71 | 5mer-71 | KLQSK | 68 | 371 | 5mer-371 | RGISK | 86 |
| 72 | 5mer-72 | KLYRR | 50 | 372 | 5mer-372 | RSVCR | 54 |
| 73 | 5mer-73 | RRQRR | 179 | 373 | 5mer-373 | KVFTK | 87 |
| 74 | 5mer-74 | RQITK | 87 | 374 | 5mer-374 | KLFTR | 75 |
| 75 | 5mer-75 | KVQTK | 63 | 375 | 5mer-375 | KQLCR | 84 |
| 76 | 5mer-76 | RGYRR | 80 | 376 | 5mer-376 | KGQLR | 65 |
| 77 | 5mer-77 | KWRQK | 74 | 377 | 5mer-377 | KGFYK | 67 |
| 78 | 5mer-78 | KVICK | 79 | 378 | 5mer-378 | RRLSK | 65 |
| 79 | 5mer-79 | RWFLR | 82 | 379 | 5mer-379 | KSRLR | 79 |
| 80 | 5mer-80 | KSRTR | 83 | 380 | 5mer-380 | KRYLK | 82 |
| 81 | 5mer-81 | RGIYR | 79 | 381 | 5mer-381 | KGQRR | 87 |
| 82 | 5mer-82 | RQRYK | 84 | 382 | 5mer-382 | RLRQR | 62 |
| 83 | 5mer-83 | KGFSR | 64 | 383 | 5mer-383 | RWORK | 56 |
| 84 | 5mer-84 | RVVRR | 67 | 384 | 5mer-384 | KSLRK | 75 |
| 85 | 5mer-85 | KGVLK | 74 | 385 | 5mer-385 | RGVYR | 51 |
| 86 | 5mer-86 | RRLCK | 55 | 386 | 5mer-386 | RSFLK | 78 |
| 87 | 5mer-87 | RQITR | 55 | 387 | 5mer-387 | RRILR | 52 |
| 88 | 5mer-88 | RRVQK | 73 | 388 | 5mer-388 | KLFCK | 78 |
| 89 | 5mer-89 | KRITK | 77 | 389 | 5mer-389 | KWRRR | 57 |
| 90 | 5mer-90 | RWYTK | 86 | 390 | 5mer-390 | KRFCR | 64 |
| 91 | 5mer-91 | RQIQK | 55 | 391 | 5mer-391 | KVFRR | 72 |
| 92 | 5mer-92 | RVRLK | 62 | 392 | 5mer-392 | RSRLR | 87 |
| 93 | 5mer-93 | KWVYR | 79 | 393 | 5mer-393 | KSLQR | 75 |
| 94 | 5mer-94 | RWFQR | 50 | 394 | 5mer-394 | KRRRK | 66 |
| 95 | 5mer-95 | RGRRK | 68 | 395 | 5mer-395 | RWVCK | 50 |
| 96 | 5mer-96 | RVLYR | 55 | 396 | 5mer-396 | KVVCR | 53 |
| 97 | 5mer-97 | KRQLR | 52 | 397 | 5mer-397 | RRITK | 52 |
| 98 | 5mer-98 | KWYCK | 68 | 398 | 5mer-398 | KGQCR | 71 |
| 99 | 5mer-99 | RWICK | 58 | 399 | 5mer-399 | KWIQR | 62 |
| 100 | 5mer-100 | KVIRK | 80 | 400 | 5mer-400 | RWRCK | 70 |
| 101 | 5mer-101 | RQQYR | 55 | 401 | 5mer-401 | RGVLR | 52 |
| 102 | 5mer-102 | RGFSK | 82 | 402 | 5mer-402 | RLRYR | 86 |
| 103 | 5mer-103 | RWFLK | 62 | 403 | 5mer-403 | RRLYK | 64 |
| 104 | 5mer-104 | RVVLK | 74 | 404 | 5mer-404 | KGYLK | 83 |
| 105 | 5mer-105 | RGQQR | 50 | 405 | 5mer-405 | KSYTK | 68 |
| 106 | 5mer-106 | KLLQR | 78 | 406 | 5mer-406 | KVYLR | 84 |
| 107 | 5mer-107 | RWVSR | 56 | 407 | 5mer-407 | RQIYK | 58 |
| 108 | 5mer-108 | KWQLK | 77 | 408 | 5mer-408 | KVFRK | 74 |
| 109 | 5mer-109 | RLQCR | 68 | 409 | 5mer-409 | KQIYK | 62 |
| 110 | 5mer-110 | KRRLK | 76 | 410 | 5mer-410 | RRFLR | 76 |
| 111 | 5mer-111 | KSVLK | 85 | 411 | 5mer-411 | KGRLR | 66 |
| 112 | 5mer-112 | KRYYR | 58 | 412 | 5mer-412 | RGRSR | 81 |
| 113 | 5mer-113 | KRLRK | 79 | 413 | 5mer-413 | RWLTR | 56 |
| 114 | 5mer-114 | KRQRR | 82 | 414 | 5mer-414 | KVRCK | 71 |
| 115 | 5mer-115 | RWLLR | 75 | 415 | 5mer-415 | KVFLR | 77 |
| 116 | 5mer-116 | RWRSK | 64 | 416 | 5mer-416 | KLYLR | 67 |
| 117 | 5mer-117 | RSVYK | 69 | 417 | 5mer-417 | KWLQK | 65 |
| 118 | 5mer-118 | RVICK | 87 | 418 | 5mer-418 | RWRTR | 53 |
| 119 | 5mer-119 | KQIRK | 60 | 419 | 5mer-419 | RVYTR | 67 |
| 120 | 5mer-120 | RQILK | 68 | 420 | 5mer-420 | KLFCR | 84 |
| 121 | 5mer-121 | RQVTR | 73 | 421 | 5mer-421 | RVVYK | 68 |
| 122 | 5mer-122 | RSYQK | 78 | 422 | 5mer-422 | KWICK | 87 |
| 123 | 5mer-123 | KWIRR | 53 | 423 | 5mer-423 | RRQLK | 60 |
| 124 | 5mer-124 | KGFSK | 58 | 424 | 5mer-424 | RVYLK | 87 |
| 125 | 5mer-125 | RVRQK | 67 | 425 | 5mer-425 | RGFYR | 80 |
| 126 | 5mer-126 | RGVTK | 61 | 426 | 5mer-426 | RRVSR | 57 |
| 127 | 5mer-127 | RWVTK | 86 | 427 | 5mer-427 | RGLYR | 87 |
| 128 | 5mer-128 | RGVCR | 56 | 428 | 5mer-428 | RQFLK | 86 |
| 129 | 5mer-129 | KSLLK | 63 | 429 | 5mer-429 | KSQYK | 63 |
| 130 | 5mer-130 | RRFRK | 80 | 430 | 5mer-430 | KWRTK | 80 |
| 131 | 5mer-131 | KLRRR | 72 | 431 | 5mer-431 | KVQLK | 81 |
| 132 | 5mer-132 | RVRCK | 83 | 432 | 5mer-432 | RQVRR | 52 |
| 133 | 5mer-133 | KGQRK | 84 | 433 | 5mer-433 | KWRCR | 73 |
| 134 | 5mer-134 | RQFSK | 61 | 434 | 5mer-434 | RVLQK | 74 |
| 135 | 5mer-135 | RRLLR | 64 | 435 | 5mer-435 | KLRQR | 69 |
| 136 | 5mer-136 | RRIYK | 75 | 436 | 5mer-436 | RVFYK | 60 |
| 137 | 5mer-137 | KGVSK | 77 | 437 | 5mer-437 | RVRLR | 50 |
| 138 | 5mer-138 | RQRCR | 71 | 438 | 5mer-438 | RVRSR | 76 |
| 139 | 5mer-139 | RLQYK | 73 | 439 | 5mer-439 | KRVTR | 65 |
| 140 | 5mer-140 | KWRLR | 69 | 440 | 5mer-440 | RQVTK | 57 |
| 141 | 5mer-141 | RWQQR | 50 | 441 | 5mer-441 | KLIRK | 53 |
| 142 | 5mer-142 | RQYSR | 52 | 442 | 5mer-442 | KVRLR | 61 |
| 143 | 5mer-143 | KGQQR | 64 | 443 | 5mer-443 | RGFTK | 80 |
| 144 | 5mer-144 | KRFSK | 58 | 444 | 5mer-444 | KQQYR | 65 |
| 145 | 5mer-145 | RSFSK | 62 | 445 | 5mer-445 | RLFTR | 77 |
| 146 | 5mer-146 | RWFTK | 52 | 446 | 5mer-446 | RGLQK | 53 |
| 147 | 5mer-147 | RRYQK | 66 | 447 | 5mer-447 | KGYYK | 76 |
| 148 | 5mer-148 | RSQTK | 50 | 448 | 5mer-448 | RQIRK | 74 |
| 149 | 5mer-149 | KQFLR | 80 | 449 | 5mer-449 | KGLYR | 65 |
| 150 | 5mer-150 | RVRTR | 64 | 450 | 5mer-450 | RVIQK | 78 |
| 151 | 5mer-151 | RVFTK | 66 | 451 | 5mer-451 | RQVLK | 53 |
| 152 | 5mer-152 | RRRRR | 56 | 452 | 5mer-452 | RGVSK | 82 |
| 153 | 5mer-153 | RSIQK | 72 | 453 | 5mer-453 | KGVCR | 68 |
| 154 | 5mer-154 | RSITR | 54 | 454 | 5mer-454 | RQVLR | 77 |
| 155 | 5mer-155 | KRYLR | 57 | 455 | 5mer-455 | RWLYK | 61 |
| 156 | 5mer-156 | KGLRK | 85 | 456 | 5mer-456 | RLVCK | 52 |
| 157 | 5mer-157 | KGRCR | 78 | 457 | 5mer-457 | RGQYK | 59 |
| 158 | 5mer-158 | RWQTK | 65 | 458 | 5mer-458 | RRFLK | 65 |
| 159 | 5mer-159 | RGQRR | 73 | 459 | 5mer-459 | RSQLR | 76 |
| 160 | 5mer-160 | RSIRR | 53 | 460 | 5mer-460 | RLQQR | 74 |
| 161 | 5mer-161 | KWVTK | 52 | 461 | 5mer-461 | KQLLK | 74 |
| 162 | 5mer-162 | RGYQR | 51 | 462 | 5mer-462 | RWQSK | 69 |
| 163 | 5mer-163 | KSLCK | 61 | 463 | 5mer-463 | KWYTK | 52 |
| 164 | 5mer-164 | KSICK | 54 | 464 | 5mer-464 | RGVTR | 57 |
| 165 | 5mer-165 | KWRSK | 56 | 465 | 5mer-465 | RWFRK | 57 |
| 166 | 5mer-166 | KSFOR | 55 | 466 | 5mer-466 | RRVRK | 53 |
| 167 | 5mer-167 | KQFRK | 64 | 467 | 5mer-467 | RRIYR | 83 |
| 168 | 5mer-168 | KLFSK | 84 | 468 | 5mer-468 | RWQCK | 54 |
| 169 | 5mer-169 | RWYRK | 61 | 469 | 5mer-469 | KSRRR | 69 |
| 170 | 5mer-170 | RLICK | 62 | 470 | 5mer-470 | KQRSK | 57 |
| 171 | 5mer-171 | KSIQR | 55 | 471 | 5mer-471 | RGYLR | 69 |
| 172 | 5mer-172 | RSRRR | 82 | 472 | 5mer-472 | RRYRK | 55 |
| 173 | 5mer-173 | RSVSR | 59 | 473 | 5mer-473 | RLVQR | 75 |
| 174 | 5mer-174 | KGRQR | 59 | 474 | 5mer-474 | RQFLR | 80 |
| 175 | 5mer-175 | RWQLK | 63 | 475 | 5mer-475 | RRFCK | 56 |
| 176 | 5mer-176 | RVLYK | 52 | 476 | 5mer-476 | RSICK | 70 |
| 177 | 5mer-177 | RWVRK | 77 | 477 | 5mer-477 | KGYSR | 58 |
| 178 | 5mer-178 | RRVLK | 87 | 478 | 5mer-478 | RVQTK | 75 |
| 179 | 5mer-179 | RLYTK | 55 | 479 | 5mer-479 | RQYYK | 70 |
| 180 | 5mer-180 | KQRYR | 74 | 480 | 5mer-480 | RWYLR | 75 |
| 181 | 5mer-181 | RSLLK | 72 | 481 | 5mer-481 | KSYCK | 78 |
| 182 | 5mer-182 | RVLSK | 70 | 482 | 5mer-482 | KQFCK | 75 |
| 183 | 5mer-183 | KRVYR | 64 | 483 | 5mer-483 | RSISR | 51 |
| 184 | 5mer-184 | KLQCR | 68 | 484 | 5mer-484 | RSFQK | 51 |
| 185 | 5mer-185 | RRYRR | 86 | 485 | 5mer-485 | KRQRK | 58 |
| 186 | 5mer-186 | KRLQR | 64 | 486 | 5mer-486 | RWLQR | 53 |
| 187 | 5mer-187 | RWVCR | 74 | 487 | 5mer-487 | RLVTK | 62 |
| 188 | 5mer-188 | KWFSK | 82 | 488 | 5mer-488 | KVRSR | 58 |
| 189 | 5mer-189 | RLLQK | 65 | 489 | 5mer-489 | KSYSR | 63 |
| 190 | 5mer-190 | RWRSR | 84 | 490 | 5mer-490 | RWLLK | 60 |
| 191 | 5mer-191 | RVRCR | 75 | 491 | 5mer-491 | KQIRR | 81 |
| 192 | 5mer-192 | KSFRK | 75 | 492 | 5mer-492 | RVVLR | 80 |
| 193 | 5mer-193 | RVIRK | 80 | 493 | 5mer-493 | KSIRR | 57 |
| 194 | 5mer-194 | KWQSK | 84 | 494 | 5mer-494 | RGFCK | 54 |
| 195 | 5mer-195 | KVVSR | 82 | 495 | 5mer-495 | KVVTK | 52 |
| 196 | 5mer-196 | RSYYR | 69 | 496 | 5mer-496 | KGIQK | 81 |
| 197 | 5mer-197 | RSRQK | 68 | 497 | 5mer-497 | KRRCR | 76 |
| 198 | 5mer-198 | KLISR | 74 | 498 | 5mer-498 | KLISK | 53 |
| 199 | 5mer-199 | KRYQR | 84 | 499 | 5mer-499 | RVLTK | 76 |
| 200 | 5mer-200 | KRVRR | 55 | 500 | 5mer-500 | KSLQK | 63 |
| 201 | 5mer-201 | RWIYR | 62 | 501 | 5mer-501 | KLQRK | 78 |
| 202 | 5mer-202 | KWYRR | 65 | 502 | 5mer-502 | RRISR | 84 |
| 203 | 5mer-203 | RQLTR | 78 | 503 | 5mer-503 | KRVSK | 61 |
| 204 | 5mer-204 | RQFQR | 84 | 504 | 5mer-504 | KQIQR | 72 |
| 205 | 5mer-205 | RWYYR | 75 | 505 | 5mer-505 | RQIYR | 71 |
| 206 | 5mer-206 | KLQLR | 57 | 506 | 5mer-506 | RGRLR | 51 |
| 207 | 5mer-207 | KQVRR | 72 | 507 | 5mer-507 | KWVQK | 84 |
| 208 | 5mer-208 | KLICR | 80 | 508 | 5mer-508 | KGLQK | 67 |
| 209 | 5mer-209 | RGVRR | 78 | 509 | 5mer-509 | RVQRK | 61 |
| 210 | 5mer-210 | KVYYR | 67 | 510 | 5mer-510 | RQLSK | 71 |
| 211 | 5mer-211 | RLYYR | 73 | 511 | 5mer-511 | KSLSR | 56 |
| 212 | 5mer-212 | KQQYK | 64 | 512 | 5mer-512 | RLYLK | 70 |
| 213 | 5mer-213 | RQYTK | 83 | 513 | 5mer-513 | RWYYK | 83 |
| 214 | 5mer-214 | KQQCK | 79 | 514 | 5mer-514 | KLLLK | 52 |
| 215 | 5mer-215 | RQYRR | 79 | 515 | 5mer-515 | RGQRK | 56 |
| 216 | 5mer-216 | KWVRR | 56 | 516 | 5mer-516 | KWQTR | 83 |
| 217 | 5mer-217 | KLQRR | 72 | 517 | 5mer-517 | KGYTR | 70 |
| 218 | 5mer-218 | KVQYK | 80 | 518 | 5mer-518 | RVYYR | 87 |
| 219 | 5mer-219 | KQYTR | 55 | 519 | 5mer-519 | RLYSK | 72 |
| 220 | 5mer-220 | KRILR | 81 | 520 | 5mer-520 | RVLLK | 86 |
| 221 | 5mer-221 | RGRTR | 58 | 521 | 5mer-521 | KRFRK | 78 |
| 222 | 5mer-222 | KWLLR | 86 | 522 | 5mer-522 | RLVYR | 78 |
| 223 | 5mer-223 | KQVRK | 61 | 523 | 5mer-523 | KQFQK | 84 |
| 224 | 5mer-224 | RLQRR | 67 | 524 | 5mer-524 | RRICR | 83 |
| 225 | 5mer-225 | KRQQK | 51 | 525 | 5mer-525 | KQRYK | 51 |
| 226 | 5mer-226 | RRYTR | 60 | 526 | 5mer-526 | KQFSR | 54 |
| 227 | 5mer-227 | RRQQR | 84 | 527 | 5mer-527 | KSVQR | 70 |
| 228 | 5mer-228 | KRFLK | 53 | 528 | 5mer-528 | RVLLR | 50 |
| 229 | 5mer-229 | KGLTR | 84 | 529 | 5mer-529 | RVQSR | 84 |
| 230 | 5mer-230 | KVLCR | 67 | 530 | 5mer-530 | RWRRR | 80 |
| 231 | 5mer-231 | KGLLK | 60 | 531 | 5mer-531 | KRQSR | 65 |
| 232 | 5mer-232 | KWYTR | 71 | 532 | 5mer-532 | KQICK | 75 |
| 233 | 5mer-233 | RVYYK | 84 | 533 | 5mer-533 | RLVYK | 84 |
| 234 | 5mer-234 | RQYCR | 62 | 534 | 5mer-534 | RRQLR | 50 |
| 235 | 5mer-235 | KGYSK | 70 | 535 | 5mer-535 | KSLLR | 70 |
| 236 | 5mer-236 | KRRCK | 81 | 536 | 5mer-536 | RLITK | 78 |
| 237 | 5mer-237 | RGLRK | 77 | 537 | 5mer-537 | RLRLR | 59 |
| 238 | 5mer-238 | KQVLK | 58 | 538 | 5mer-538 | KQQQR | 72 |
| 239 | 5mer-239 | KRLYR | 61 | 539 | 5mer-539 | RVVTR | 70 |
| 240 | 5mer-240 | KWRYR | 51 | 540 | 5mer-540 | RQFYR | 74 |
| 241 | 5mer-241 | KVRCR | 51 | 541 | 5mer-541 | KVFLK | 80 |
| 242 | 5mer-242 | RGYTK | 64 | 542 | 5mer-542 | KRYTR | 85 |
| 243 | 5mer-243 | KLLSK | 51 | 543 | 5mer-543 | RLRLK | 65 |
| 244 | 5mer-244 | KSVSK | 78 | 544 | 5mer-544 | RLQLR | 63 |
| 245 | 5mer-245 | RQRSK | 62 | 545 | 5mer-545 | KGQYR | 80 |
| 246 | 5mer-246 | KSFTR | 60 | 546 | 5mer-546 | KVVLK | 65 |
| 247 | 5mer-247 | RWYCR | 80 | 547 | 5mer-547 | KQVTK | 77 |
| 248 | 5mer-248 | RWYLK | 63 | 548 | 5mer-548 | KWLCK | 60 |
| 249 | 5mer-249 | RSYCR | 52 | 549 | 5mer-549 | KWITK | 78 |
| 250 | 5mer-250 | RQFSR | 76 | 550 | 5mer-550 | RQQSR | 83 |
| 251 | 5mer-251 | KRISK | 70 | 551 | 5mer-551 | RWQYR | 59 |
| 252 | 5mer-252 | KQYRK | 53 | 552 | 5mer-552 | RLYSR | 63 |
| 253 | 5mer-253 | RSLYR | 75 | 553 | 5mer-553 | KLLSR | 72 |
| 254 | 5mer-254 | KLLRK | 87 | 554 | 5mer-554 | RLLSK | 65 |
| 255 | 5mer-255 | KQRTR | 82 | 555 | 5mer-555 | KVQCK | 71 |
| 256 | 5mer-256 | RGVCK | 60 | 556 | 5mer-556 | RVIYK | 52 |
| 257 | 5mer-257 | RQFTR | 85 | 557 | 5mer-557 | KQRRK | 87 |
| 258 | 5mer-258 | KRQYK | 84 | 558 | 5mer-558 | RWRYK | 84 |
| 259 | 5mer-259 | RLIRK | 71 | 559 | 5mer-559 | KQQLK | 81 |
| 260 | 5mer-260 | KVYRR | 57 | 560 | 5mer-560 | KWYQR | 59 |
| 261 | 5mer-261 | RRVLR | 59 | 561 | 5mer-561 | KWRCK | 72 |
| 262 | 5mer-262 | KSRCR | 59 | 562 | 5mer-562 | RVRQR | 70 |
| 263 | 5mer-263 | KQVTR | 80 | 563 | 5mer-563 | RLVLK | 60 |
| 264 | 5mer-264 | KWYRK | 50 | 564 | 5mer-564 | RSRYR | 74 |
| 265 | 5mer-265 | RWQCR | 77 | 565 | 5mer-565 | RLVSK | 77 |
| 266 | 5mer-266 | KSYQK | 66 | 566 | 5mer-566 | KQLYK | 78 |
| 267 | 5mer-267 | KRLLK | 66 | 567 | 5mer-567 | RRYCK | 63 |
| 268 | 5mer-268 | KRYCK | 54 | 568 | 5mer-568 | KQITR | 64 |
| 269 | 5mer-269 | RLFLR | 85 | 569 | 5mer-569 | RQQRK | 79 |
| 270 | 5mer-270 | RSQQR | 52 | 570 | 5mer-570 | KLVRR | 56 |
| 271 | 5mer-271 | RGRYR | 68 | 571 | 5mer-571 | RRLTK | 51 |
| 272 | 5mer-272 | KGYQR | 83 | 572 | 5mer-572 | KLRTK | 58 |
| 273 | 5mer-273 | RVQSK | 82 | 573 | 5mer-573 | RSIYR | 84 |
| 274 | 5mer-274 | RQVRK | 62 | 574 | 5mer-574 | KGFTR | 59 |
| 275 | 5mer-275 | KVYTR | 64 | 575 | 5mer-575 | KGFYR | 69 |
| 276 | 5mer-276 | RSLRR | 70 | 576 | 5mer-576 | RLFRK | 62 |
| 277 | 5mer-277 | RVFTR | 82 | 577 | 5mer-577 | KLVTK | 77 |
| 278 | 5mer-278 | RWQRR | 66 | 578 | 5mer-578 | KSVLR | 65 |
| 279 | 5mer-279 | RVVTK | 56 | 579 | 5mer-579 | RSLYK | 53 |
| 280 | 5mer-280 | KWILK | 53 | 580 | 5mer-580 | RGYTR | 70 |
| 281 | 5mer-281 | RGFLK | 58 | 581 | 5mer-581 | KGVLR | 65 |
| 282 | 5mer-282 | RVLTR | 77 | 582 | 5mer-582 | RGICK | 82 |
| 283 | 5mer-283 | KWVYK | 51 | 583 | 5mer-583 | KVVYR | 75 |
| 284 | 5mer-284 | KQVQR | 52 | 584 | 5mer-584 | KQIQK | 76 |
| 285 | 5mer-285 | KGQLK | 75 | 585 | 5mer-585 | RSVSK | 74 |
| 286 | 5mer-286 | RWFQK | 71 | 586 | 5mer-586 | KGRRR | 78 |
| 287 | 5mer-287 | KRYRR | 68 | 587 | 5mer-587 | RVITR | 66 |
| 288 | 5mer-288 | KLILK | 73 | 588 | 5mer-588 | RSFTR | 60 |
| 289 | 5mer-289 | RRQYR | 87 | 589 | 5mer-589 | KGLCR | 58 |
| 290 | 5mer-290 | RGYYR | 57 | 590 | 5mer-590 | KQYTK | 81 |
| 291 | 5mer-291 | RWFTR | 72 | 591 | 5mer-591 | RVYTK | 61 |
| 292 | 5mer-292 | KLVCK | 59 | 592 | 5mer-592 | RWLCR | 56 |
| 293 | 5mer-293 | RQYYR | 83 | 593 | 5mer-593 | KQYLK | 77 |
| 294 | 5mer-294 | KQYYK | 50 | 594 | 5mer-594 | KQYSR | 50 |
| 295 | 5mer-295 | RGRCR | 52 | 595 | 5mer-595 | KWQQR | 58 |
| 296 | 5mer-296 | KWISK | 55 | 596 | 5mer-596 | KLQQR | 56 |
| 297 | 5mer-297 | RSLRK | 81 | 597 | 5mer-597 | KLVSR | 68 |
| 298 | 5mer-298 | KSIYR | 75 | 598 | 5mer-598 | RVRSK | 84 |
| 299 | 5mer-299 | KGRRK | 62 | 599 | 5mer-599 | KWVSR | 61 |
| 300 | 5mer-300 | RQYRK | 81 | 600 | 5mer-600 | KLYSK | 64 |

| | |
|---|---|
| Average Binding affinity | 68.5 |

TABLE 9
5mer Bottom sequence

| SEQ | Unique | | Binding | SEQ | Unique | | Binding |
|---|---|---|---|---|---|---|---|
| ID NO: | No. | Sequence | affinity | ID NO: | No. | Sequence | affinity |
| 601 | 5mer-601 | RFCFK | 13 | 901 | 5mer-901 | KCTNR | 30 |
| 602 | 5mer-602 | KMSVR | 12 | 902 | 5mer-902 | REDPK | 23 |
| 603 | 5mer-603 | RKEPK | 27 | 903 | 5mer-903 | RHHKR | 21 |
| 604 | 5mer-604 | RKEGK | 13 | 904 | 5mer-904 | KPDPK | 23 |
| 605 | 5mer-605 | RECFK | 22 | 905 | 5mer-905 | RPSPR | 30 |
| 606 | 5mer-606 | RIHWK | 25 | 906 | 5mer-906 | RKHAK | 31 |
| 607 | 5mer-607 | RIEER | 25 | 907 | 5mer-907 | KDSVR | 18 |
| 608 | 5mer-608 | RDSER | 20 | 908 | 5mer-908 | RCHFK | 25 |
| 609 | 5mer-609 | RKTMK | 32 | 909 | 5mer-909 | RINVK | 33 |
| 610 | 5mer-610 | KCDDK | 16 | 910 | 5mer-910 | RPCFR | 17 |
| 611 | 5mer-611 | KDHIR | 33 | 911 | 5mer-911 | REHGK | 14 |
| 612 | 5mer-612 | KCTDK | 23 | 912 | 5mer-912 | KKMGR | 16 |
| 613 | 5mer-613 | RAEFR | 20 | 913 | 5mer-913 | KHTFK | 13 |
| 614 | 5mer-614 | RNTWK | 29 | 914 | 5mer-914 | RPTMR | 26 |
| 615 | 5mer-615 | KCCNR | 20 | 915 | 5mer-915 | KMTHR | 28 |
| 616 | 5mer-616 | KFCPR | 15 | 916 | 5mer-916 | RCHER | 12 |
| 617 | 5mer-617 | RYCAK | 28 | 917 | 5mer-917 | KCAPR | 11 |
| 618 | 5mer-618 | RMSWK | 19 | 918 | 5mer-918 | RNNVR | 12 |
| 619 | 5mer-619 | KCSFK | 19 | 919 | 5mer-919 | KNNIK | 32 |
| 620 | 5mer-620 | RCMHK | 23 | 920 | 5mer-920 | KPKIK | 15 |
| 621 | 5mer-621 | KKSMK | 13 | 921 | 5mer-921 | KKKFK | 21 |
| 622 | 5mer-622 | RKPKR | 22 | 922 | 5mer-922 | RMWKR | 14 |
| 623 | 5mer-623 | KNTGR | 19 | 923 | 5mer-923 | KCWMK | 19 |
| 624 | 5mer-624 | KEHER | 22 | 924 | 5mer-924 | RNEKK | 27 |
| 625 | 5mer-625 | KMCDR | 33 | 925 | 5mer-925 | KDCFK | 25 |
| 626 | 5mer-626 | KICMR | 12 | 926 | 5mer-926 | RNCWK | 22 |
| 627 | 5mer-627 | KMSPK | 30 | 927 | 5mer-927 | RDEDR | 19 |
| 628 | 5mer-628 | RYMDR | 19 | 928 | 5mer-928 | KHMVR | 27 |
| 629 | 5mer-629 | RPTNK | 32 | 929 | 5mer-929 | KYTFR | 28 |
| 630 | 5mer-630 | RITFR | 30 | 930 | 5mer-930 | RAWVR | 20 |
| 631 | 5mer-631 | RPANR | 17 | 931 | 5mer-931 | RITER | 11 |
| 632 | 5mer-632 | RFSHR | 33 | 932 | 5mer-932 | RTAWK | 27 |
| 633 | 5mer-633 | RAAKR | 20 | 933 | 5mer-933 | RYMKK | 27 |
| 634 | 5mer-634 | RMMMR | 26 | 934 | 5mer-934 | KMMMR | 17 |
| 635 | 5mer-635 | RMNGR | 21 | 935 | 5mer-935 | RETFK | 32 |
| 636 | 5mer-636 | KDKGR | 11 | 936 | 5mer-936 | RNHKR | 29 |
| 637 | 5mer-637 | KCDHK | 28 | 937 | 5mer-937 | KASNR | 21 |
| 638 | 5mer-638 | KHCIR | 33 | 938 | 5mer-938 | RIEFK | 18 |
| 639 | 5mer-639 | KETWK | 13 | 939 | 5mer-939 | KMHAR | 24 |
| 640 | 5mer-640 | KNPHK | 15 | 940 | 5mer-940 | KCMGK | 18 |
| 641 | 5mer-641 | RITWK | 22 | 941 | 5mer-941 | KNHHR | 21 |
| 642 | 5mer-642 | RAWDR | 22 | 942 | 5mer-942 | RPSDR | 11 |
| 643 | 5mer-643 | KHDGR | 28 | 943 | 5mer-943 | KDKGK | 12 |
| 644 | 5mer-644 | RMKWK | 24 | 944 | 5mer-944 | RYEFK | 25 |
| 645 | 5mer-645 | RHKDK | 20 | 945 | 5mer-945 | RYEKR | 23 |
| 646 | 5mer-646 | KDTKR | 16 | 946 | 5mer-946 | KYPWR | 32 |
| 647 | 5mer-647 | KHTVK | 29 | 947 | 5mer-947 | KDWIR | 27 |
| 648 | 5mer-648 | KNKKR | 15 | 948 | 5mer-948 | KDSFK | 18 |
| 649 | 5mer-649 | RYSFK | 20 | 949 | 5mer-949 | KMKMK | 26 |
| 650 | 5mer-650 | RPEDK | 22 | 950 | 5mer-950 | KDADR | 22 |
| 651 | 5mer-651 | RFTVR | 11 | 951 | 5mer-951 | RYMGR | 18 |
| 652 | 5mer-652 | RCAAR | 23 | 952 | 5mer-952 | KTMHK | 12 |
| 653 | 5mer-653 | KTTWK | 16 | 953 | 5mer-953 | RKMAR | 23 |
| 654 | 5mer-654 | KEWNR | 27 | 954 | 5mer-954 | KTEVK | 23 |
| 655 | 5mer-655 | RKCIR | 15 | 955 | 5mer-955 | KNADK | 14 |
| 656 | 5mer-656 | KATGR | 13 | 956 | 5mer-956 | KPTWK | 19 |
| 657 | 5mer-657 | KDNDR | 22 | 957 | 5mer-957 | RDCER | 30 |
| 658 | 5mer-658 | KKWGR | 31 | 958 | 5mer-958 | RKWKR | 11 |
| 659 | 5mer-659 | KIHEK | 22 | 959 | 5mer-959 | KPNMK | 29 |
| 660 | 5mer-660 | KFDVK | 11 | 960 | 5mer-960 | RNPGK | 14 |
| 661 | 5mer-661 | RCNMK | 30 | 961 | 5mer-961 | KIANR | 32 |
| 662 | 5mer-662 | KIEEK | 28 | 962 | 5mer-962 | RIWKR | 23 |
| 663 | 5mer-663 | RATPR | 31 | 963 | 5mer-963 | RAPNK | 24 |
| 664 | 5mer-664 | KPTWR | 17 | 964 | 5mer-964 | KYTDR | 22 |
| 665 | 5mer-665 | KTWEK | 26 | 965 | 5mer-965 | KMEIR | 30 |
| 666 | 5mer-666 | RHDWR | 18 | 966 | 5mer-966 | RPSAK | 32 |
| 667 | 5mer-667 | RDCHR | 16 | 967 | 5mer-967 | KKTHK | 26 |
| 668 | 5mer-668 | RPHAK | 27 | 968 | 5mer-968 | RIPHR | 11 |
| 669 | 5mer-669 | RNPER | 24 | 969 | 5mer-969 | RNTVR | 27 |
| 670 | 5mer-670 | KPCVK | 23 | 970 | 5mer-970 | KYMNR | 33 |
| 671 | 5mer-671 | KMNAK | 21 | 971 | 5mer-971 | KMTGK | 12 |
| 672 | 5mer-672 | KHAPK | 12 | 972 | 5mer-972 | KYAKR | 14 |
| 673 | 5mer-673 | RISPR | 14 | 973 | 5mer-973 | RYWAR | 12 |
| 674 | 5mer-674 | KETHR | 22 | 974 | 5mer-974 | RHMMR | 26 |
| 675 | 5mer-675 | RKPGR | 31 | 975 | 5mer-975 | RFAHK | 18 |
| 676 | 5mer-676 | RTMFR | 18 | 976 | 5mer-976 | RETNR | 16 |
| 677 | 5mer-677 | RCEMR | 15 | 977 | 5mer-977 | KNMIR | 16 |
| 678 | 5mer-678 | KYMGR | 23 | 978 | 5mer-978 | RYDHK | 30 |
| 679 | 5mer-679 | KKTVK | 21 | 979 | 5mer-979 | RHHMK | 23 |
| 680 | 5mer-680 | RFTER | 21 | 980 | 5mer-980 | RKPHR | 33 |
| 681 | 5mer-681 | KDTMR | 18 | 981 | 5mer-981 | KNDKK | 33 |
| 682 | 5mer-682 | KPNVK | 31 | 982 | 5mer-982 | KFMHK | 12 |
| 683 | 5mer-683 | KYPDK | 32 | 983 | 5mer-983 | RTTGR | 23 |
| 684 | 5mer-684 | KCAER | 27 | 984 | 5mer-984 | KNAHK | 11 |
| 685 | 5mer-685 | RNDIK | 21 | 985 | 5mer-985 | RDPKR | 17 |
| 686 | 5mer-686 | RFNIR | 18 | 986 | 5mer-986 | RPMDK | 12 |
| 687 | 5mer-687 | RMEIR | 22 | 987 | 5mer-987 | RAHWR | 22 |
| 688 | 5mer-688 | RPHFK | 31 | 988 | 5mer-988 | RCKWR | 17 |
| 689 | 5mer-689 | RFSDK | 20 | 989 | 5mer-989 | RCTAR | 31 |
| 690 | 5mer-690 | RAEIK | 12 | 990 | 5mer-990 | KEEPK | 12 |
| 691 | 5mer-691 | KEWEK | 16 | 991 | 5mer-991 | RPEFR | 24 |
| 692 | 5mer-692 | RDHWK | 15 | 992 | 5mer-992 | RNDKK | 15 |
| 693 | 5mer-693 | RPSKK | 17 | 993 | 5mer-993 | KEKFR | 27 |
| 694 | 5mer-694 | KNNAR | 24 | 994 | 5mer-994 | KAWVR | 26 |
| 695 | 5mer-695 | KKPDR | 26 | 995 | 5mer-995 | KFTDK | 18 |
| 696 | 5mer-696 | RCEHR | 11 | 996 | 5mer-996 | RMTKK | 32 |
| 697 | 5mer-697 | KASKK | 25 | 997 | 5mer-997 | RYPHR | 30 |
| 698 | 5mer-698 | KFDWK | 12 | 998 | 5mer-998 | RCTAK | 18 |
| 699 | 5mer-699 | KKNER | 12 | 999 | 5mer-999 | KTKFK | 19 |
| 700 | 5mer-700 | RAWER | 17 | 1000 | 5mer-1000 | KHCWR | 20 |
| 701 | 5mer-701 | RNHNK | 22 | 1001 | 5mer-1001 | KPCGK | 33 |
| 702 | 5mer-702 | KISHK | 30 | 1002 | 5mer-1002 | KEDNK | 12 |
| 703 | 5mer-703 | KPNWR | 22 | 1003 | 5mer-1003 | RMTVR | 11 |
| 704 | 5mer-704 | RFMGK | 28 | 1004 | 5mer-1004 | RDADR | 30 |
| 705 | 5mer-705 | RHAKK | 15 | 1005 | 5mer-1005 | RTHGR | 30 |
| 706 | 5mer-706 | RKMAK | 27 | 1006 | 5mer-1006 | KEPER | 17 |
| 707 | 5mer-707 | KIEAK | 32 | 1007 | 5mer-1007 | RDMMR | 30 |
| 708 | 5mer-708 | KPKAR | 20 | 1008 | 5mer-1008 | KDSNR | 11 |
| 709 | 5mer-709 | RHTIR | 27 | 1009 | 5mer-1009 | KMCAK | 29 |
| 710 | 5mer-710 | KEKAR | 21 | 1010 | 5mer-1010 | KCDNK | 16 |
| 711 | 5mer-711 | KECIK | 32 | 1011 | 5mer-1011 | KTDMK | 25 |
| 712 | 5mer-712 | RADFK | 18 | 1012 | 5mer-1012 | RHKVR | 22 |
| 713 | 5mer-713 | KYPKK | 16 | 1013 | 5mer-1013 | KCCVK | 19 |
| 714 | 5mer-714 | RPCAK | 32 | 1014 | 5mer-1014 | RKNKR | 23 |
| 715 | 5mer-715 | KCNGR | 22 | 1015 | 5mer-1015 | RCWMK | 30 |
| 716 | 5mer-716 | KINVR | 25 | 1016 | 5mer-1016 | KYTMR | 28 |
| 717 | 5mer-717 | KCKFR | 20 | 1017 | 5mer-1017 | RCTWK | 24 |
| 718 | 5mer-718 | RNKKK | 19 | 1018 | 5mer-1018 | KFWAK | 20 |
| 719 | 5mer-719 | KISER | 21 | 1019 | 5mer-1019 | RFKFK | 28 |
| 720 | 5mer-720 | KDPKR | 32 | 1020 | 5mer-1020 | KCKVK | 12 |
| 721 | 5mer-721 | RYSKK | 22 | 1021 | 5mer-1021 | KITHK | 26 |
| 722 | 5mer-722 | KNHKK | 33 | 1022 | 5mer-1022 | KIADK | 29 |
| 723 | 5mer-723 | RASPR | 22 | 1023 | 5mer-1023 | RYCKK | 13 |
| 724 | 5mer-724 | KTTAK | 14 | 1024 | 5mer-1024 | KIDNK | 26 |
| 725 | 5mer-725 | RNADR | 19 | 1025 | 5mer-1025 | RHKWK | 25 |
| 726 | 5mer-726 | KATMK | 33 | 1026 | 5mer-1026 | RNAVR | 20 |
| 727 | 5mer-727 | KMDAR | 31 | 1027 | 5mer-1027 | KNTNR | 28 |
| 728 | 5mer-728 | KPHIK | 19 | 1028 | 5mer-1028 | RMAMR | 28 |
| 729 | 5mer-729 | KEPDK | 23 | 1029 | 5mer-1029 | KADIK | 25 |
| 730 | 5mer-730 | KFCNK | 27 | 1030 | 5mer-1030 | RISDK | 18 |
| 731 | 5mer-731 | KADHK | 18 | 1031 | 5mer-1031 | RKEER | 13 |
| 732 | 5mer-732 | KIMWR | 22 | 1032 | 5mer-1032 | RHHMR | 23 |
| 733 | 5mer-733 | KTCDR | 23 | 1033 | 5mer-1033 | REWDK | 28 |
| 734 | 5mer-734 | KATER | 16 | 1034 | 5mer-1034 | RFAKK | 14 |
| 735 | 5mer-735 | RHCER | 11 | 1035 | 5mer-1035 | KEHVR | 19 |
| 736 | 5mer-736 | KKHHR | 24 | 1036 | 5mer-1036 | KTHMK | 23 |
| 737 | 5mer-737 | RINVR | 13 | 1037 | 5mer-1037 | KKSFR | 28 |
| 738 | 5mer-738 | KTPMK | 29 | 1038 | 5mer-1038 | KCCKR | 17 |
| 739 | 5mer-739 | KDCPR | 16 | 1039 | 5mer-1039 | KKDVK | 32 |
| 740 | 5mer-740 | RMMGK | 21 | 1040 | 5mer-1040 | KTPWR | 17 |
| 741 | 5mer-741 | KPTPR | 14 | 1041 | 5mer-1041 | RDWFK | 27 |
| 742 | 5mer-742 | RNSDK | 11 | 1042 | 5mer-1042 | RCCAK | 28 |
| 743 | 5mer-743 | KYAFR | 15 | 1043 | 5mer-1043 | KFEMK | 15 |
| 744 | 5mer-744 | KTEAK | 32 | 1044 | 5mer-1044 | RDCFK | 22 |
| 745 | 5mer-745 | RMEIK | 14 | 1045 | 5mer-1045 | KMDEK | 22 |
| 746 | 5mer-746 | RMTVK | 26 | 1046 | 5mer-1046 | KHTMR | 19 |
| 747 | 5mer-747 | RKTDK | 31 | 1047 | 5mer-1047 | KAHMR | 23 |
| 748 | 5mer-748 | REPMK | 12 | 1048 | 5mer-1048 | KYDNK | 12 |
| 749 | 5mer-749 | KHTWR | 24 | 1049 | 5mer-1049 | KPPGR | 29 |
| 750 | 5mer-750 | KEADK | 13 | 1050 | 5mer-1050 | KPEDR | 31 |
| 751 | 5mer-751 | RYMMR | 20 | 1051 | 5mer-1051 | RYAHR | 28 |
| 752 | 5mer-752 | KAWVK | 26 | 1052 | 5mer-1052 | RNDWR | 17 |
| 753 | 5mer-753 | RKTPK | 30 | 1053 | 5mer-1053 | KHEHK | 27 |
| 754 | 5mer-754 | RKNER | 29 | 1054 | 5mer-1054 | RNKVR | 21 |
| 755 | 5mer-755 | KNWDR | 15 | 1055 | 5mer-1055 | KHHEK | 15 |
| 756 | 5mer-756 | RCDWR | 18 | 1056 | 5mer-1056 | RCTPK | 11 |
| 757 | 5mer-757 | KYCMR | 17 | 1057 | 5mer-1057 | RFDPK | 13 |
| 758 | 5mer-758 | KCDFK | 30 | 1058 | 5mer-1058 | KIPWR | 25 |
| 759 | 5mer-759 | KHKMR | 17 | 1059 | 5mer-1059 | RMAGR | 29 |
| 760 | 5mer-760 | RIWAR | 19 | 1060 | 5mer-1060 | KTHIK | 29 |
| 761 | 5mer-761 | RMPWR | 31 | 1061 | 5mer-1061 | KDSFR | 24 |
| 762 | 5mer-762 | KMPER | 21 | 1062 | 5mer-1062 | RAPWR | 24 |
| 763 | 5mer-763 | RCHVR | 30 | 1063 | 5mer-1063 | RPHVK | 20 |
| 764 | 5mer-764 | KTWPK | 19 | 1064 | 5mer-1064 | KCMKR | 20 |
| 765 | 5mer-765 | RNEFR | 12 | 1065 | 5mer-1065 | KNPIR | 18 |
| 766 | 5mer-766 | RNMEK | 30 | 1066 | 5mer-1066 | RFWVK | 25 |
| 767 | 5mer-767 | RFHFK | 12 | 1067 | 5mer-1067 | KHENK | 23 |
| 768 | 5mer-768 | RDSWR | 11 | 1068 | 5mer-1068 | RMHKK | 11 |
| 769 | 5mer-769 | KTEWK | 32 | 1069 | 5mer-1069 | RPSFK | 31 |
| 770 | 5mer-770 | KKPFR | 11 | 1070 | 5mer-1070 | RETGK | 26 |
| 771 | 5mer-771 | RKWVK | 24 | 1071 | 5mer-1071 | RYEGR | 16 |
| 772 | 5mer-772 | KYWFK | 11 | 1072 | 5mer-1072 | KDWPK | 32 |
| 773 | 5mer-773 | RPNMR | 25 | 1073 | 5mer-1073 | RDEAK | 29 |
| 774 | 5mer-774 | RTCDR | 25 | 1074 | 5mer-1074 | RPCPR | 17 |
| 775 | 5mer-775 | RHTVK | 23 | 1075 | 5mer-1075 | RKHIK | 26 |
| 776 | 5mer-776 | RCDFR | 17 | 1076 | 5mer-1076 | KFEKK | 21 |
| 777 | 5mer-777 | RYNWK | 28 | 1077 | 5mer-1077 | KADMK | 12 |
| 778 | 5mer-778 | KKDHK | 24 | 1078 | 5mer-1078 | KEAWK | 19 |
| 779 | 5mer-779 | KYPPR | 21 | 1079 | 5mer-1079 | KYTGR | 31 |
| 780 | 5mer-780 | RDSHK | 27 | 1080 | 5mer-1080 | RYTHK | 25 |
| 781 | 5mer-781 | RIDPR | 28 | 1081 | 5mer-1081 | RPNVR | 13 |
| 782 | 5mer-782 | KANAR | 32 | 1082 | 5mer-1082 | RACFR | 11 |
| 783 | 5mer-783 | KCKVR | 29 | 1083 | 5mer-1083 | KFSVR | 31 |
| 784 | 5mer-784 | RACEK | 21 | 1084 | 5mer-1084 | RTHDR | 21 |
| 785 | 5mer-785 | KPTIR | 31 | 1085 | 5mer-1085 | RTTER | 14 |
| 786 | 5mer-786 | RFNKK | 29 | 1086 | 5mer-1086 | RIWDR | 19 |
| 787 | 5mer-787 | KDNIR | 17 | 1087 | 5mer-1087 | KKKKR | 11 |
| 788 | 5mer-788 | KYHGK | 16 | 1088 | 5mer-1088 | KAKKK | 16 |
| 789 | 5mer-789 | KFWIR | 12 | 1089 | 5mer-1089 | KTHHR | 29 |
| 790 | 5mer-790 | REAGK | 33 | 1090 | 5mer-1090 | KISGK | 31 |
| 791 | 5mer-791 | KTKMR | 26 | 1091 | 5mer-1091 | KTEHR | 29 |
| 792 | 5mer-792 | RMEKK | 31 | 1092 | 5mer-1092 | KPMVK | 12 |
| 793 | 5mer-793 | KKPHR | 19 | 1093 | 5mer-1093 | REEDK | 32 |
| 794 | 5mer-794 | KEAPK | 20 | 1094 | 5mer-1094 | RYSMK | 15 |
| 795 | 5mer-795 | RTKKR | 20 | 1095 | 5mer-1095 | KAEKR | 27 |
| 796 | 5mer-796 | KNWVR | 17 | 1096 | 5mer-1096 | RPTDK | 15 |
| 797 | 5mer-797 | KETHK | 15 | 1097 | 5mer-1097 | KPDIR | 28 |
| 798 | 5mer-798 | RETMK | 13 | 1098 | 5mer-1098 | RFHGR | 31 |
| 799 | 5mer-799 | KDKPR | 24 | 1099 | 5mer-1099 | RATAR | 14 |
| 800 | 5mer-800 | KEAPR | 29 | 1100 | 5mer-1100 | RPWKR | 24 |
| 801 | 5mer-801 | KFHGR | 20 | 1101 | 5mer-1101 | KYKNR | 11 |
| 802 | 5mer-802 | RITVR | 27 | 1102 | 5mer-1102 | KTHKK | 20 |
| 803 | 5mer-803 | RFSDR | 11 | 1103 | 5mer-1103 | KKSHR | 18 |
| 804 | 5mer-804 | RNTIR | 20 | 1104 | 5mer-1104 | RETHK | 12 |
| 805 | 5mer-805 | RPTNR | 27 | 1105 | 5mer-1105 | RPTKR | 33 |
| 806 | 5mer-806 | RKMFR | 17 | 1106 | 5mer-1106 | RYTER | 18 |
| 807 | 5mer-807 | RKNKK | 20 | 1107 | 5mer-1107 | RPWHK | 21 |
| 808 | 5mer-808 | KFCIR | 13 | 1108 | 5mer-1108 | RNPIR | 19 |
| 809 | 5mer-809 | RKSGK | 15 | 1109 | 5mer-1109 | KCHPK | 14 |
| 810 | 5mer-810 | KFHKK | 11 | 1110 | 5mer-1110 | RMHMK | 13 |
| 811 | 5mer-811 | KMTMR | 32 | 1111 | 5mer-1111 | KAEHK | 12 |
| 812 | 5mer-812 | KTEGR | 27 | 1112 | 5mer-1112 | RTTFK | 29 |
| 813 | 5mer-813 | RAHVR | 21 | 1113 | 5mer-1113 | RHMER | 19 |
| 814 | 5mer-814 | RITMR | 11 | 1114 | 5mer-1114 | RKTFR | 28 |
| 815 | 5mer-815 | RKDHR | 27 | 1115 | 5mer-1115 | KEPEK | 27 |
| 816 | 5mer-816 | RKPIK | 26 | 1116 | 5mer-1116 | KECFR | 24 |
| 817 | 5mer-817 | RHKDR | 23 | 1117 | 5mer-1117 | RHKIR | 11 |
| 818 | 5mer-818 | KHWHR | 12 | 1118 | 5mer-1118 | RMDAR | 28 |
| 819 | 5mer-819 | RNTIK | 19 | 1119 | 5mer-1119 | KMNIK | 19 |
| 820 | 5mer-820 | RIMHK | 28 | 1120 | 5mer-1120 | RPPDR | 33 |
| 821 | 5mer-821 | RESDR | 12 | 1121 | 5mer-1121 | RFKVK | 29 |
| 822 | 5mer-822 | RAKGK | 16 | 1122 | 5mer-1122 | RNTDR | 14 |
| 823 | 5mer-823 | KECFK | 26 | 1123 | 5mer-1123 | KYEKR | 24 |
| 824 | 5mer-824 | KIDMK | 13 | 1124 | 5mer-1124 | KKPVK | 30 |
| 825 | 5mer-825 | RDEKK | 14 | 1125 | 5mer-1125 | RYPFK | 29 |
| 826 | 5mer-826 | KCKMK | 11 | 1126 | 5mer-1126 | KPTHK | 26 |
| 827 | 5mer-827 | KKAGR | 18 | 1127 | 5mer-1127 | RIADR | 16 |
| 828 | 5mer-828 | RFCWR | 27 | 1128 | 5mer-1128 | REWVR | 26 |
| 829 | 5mer-829 | KCWHR | 26 | 1129 | 5mer-1129 | KFDAR | 14 |
| 830 | 5mer-830 | RIDGK | 25 | 1130 | 5mer-1130 | RFMVR | 17 |
| 831 | 5mer-831 | RAAGK | 24 | 1131 | 5mer-1131 | KCDGK | 14 |
| 832 | 5mer-832 | RMHER | 18 | 1132 | 5mer-1132 | KFSMK | 19 |
| 833 | 5mer-833 | KATAK | 33 | 1133 | 5mer-1133 | KCSMK | 23 |
| 834 | 5mer-834 | RMNIK | 15 | 1134 | 5mer-1134 | RTCKR | 26 |
| 835 | 5mer-835 | RFMMR | 14 | 1135 | 5mer-1135 | RHTAR | 17 |
| 836 | 5mer-836 | REWNR | 15 | 1136 | 5mer-1136 | KNSAR | 25 |
| 837 | 5mer-837 | RPMDR | 28 | 1137 | 5mer-1137 | KEEEK | 22 |
| 838 | 5mer-838 | RHSMK | 13 | 1138 | 5mer-1138 | RENHK | 24 |
| 839 | 5mer-839 | RHHDK | 26 | 1139 | 5mer-1139 | KHCWK | 28 |
| 840 | 5mer-840 | KDTAR | 11 | 1140 | 5mer-1140 | RNEFK | 28 |
| 841 | 5mer-841 | KNEMR | 22 | 1141 | 5mer-1141 | REEVR | 26 |
| 842 | 5mer-842 | RHNVK | 20 | 1142 | 5mer-1142 | KTENK | 24 |
| 843 | 5mer-843 | KTTPK | 17 | 1143 | 5mer-1143 | RATGK | 19 |
| 844 | 5mer-844 | KTDPR | 32 | 1144 | 5mer-1144 | KAKNR | 33 |
| 845 | 5mer-845 | RYEDR | 15 | 1145 | 5mer-1145 | RMPAK | 25 |
| 846 | 5mer-846 | RPDWR | 32 | 1146 | 5mer-1146 | KPHGR | 23 |
| 847 | 5mer-847 | KAPEK | 28 | 1147 | 5mer-1147 | RDTGK | 16 |
| 848 | 5mer-848 | RYMVK | 12 | 1148 | 5mer-1148 | RDWFR | 24 |
| 849 | 5mer-849 | KTWMK | 15 | 1149 | 5mer-1149 | KETDR | 25 |
| 850 | 5mer-850 | KYDIR | 13 | 1150 | 5mer-1150 | KFTNR | 12 |
| 851 | 5mer-851 | KMCWK | 19 | 1151 | 5mer-1151 | KTNAR | 26 |
| 852 | 5mer-852 | KDSMK | 22 | 1152 | 5mer-1152 | KENFK | 18 |
| 853 | 5mer-853 | RYHIK | 13 | 1153 | 5mer-1153 | RDAPR | 27 |
| 854 | 5mer-854 | RNTER | 21 | 1154 | 5mer-1154 | KCWVR | 12 |
| 855 | 5mer-855 | RFMKK | 18 | 1155 | 5mer-1155 | RYDMK | 25 |
| 856 | 5mer-856 | KPPDR | 23 | 1156 | 5mer-1156 | KKMNK | 13 |
| 857 | 5mer-857 | KMENR | 23 | 1157 | 5mer-1157 | KTSHR | 21 |
| 858 | 5mer-858 | RIMGR | 33 | 1158 | 5mer-1158 | KYNPR | 23 |
| 859 | 5mer-859 | KHNAR | 26 | 1159 | 5mer-1159 | KKWKK | 17 |
| 860 | 5mer-860 | RCHAK | 31 | 1160 | 5mer-1160 | KETWR | 14 |
| 861 | 5mer-861 | KTKIR | 20 | 1161 | 5mer-1161 | KCHDR | 21 |
| 862 | 5mer-862 | KKNAK | 19 | 1162 | 5mer-1162 | KIKKK | 15 |
| 863 | 5mer-863 | REANR | 16 | 1163 | 5mer-1163 | KKSKR | 12 |
| 864 | 5mer-864 | KYHPR | 25 | 1164 | 5mer-1164 | RFPWR | 33 |
| 865 | 5mer-865 | RMMER | 21 | 1165 | 5mer-1165 | RNMNR | 21 |
| 866 | 5mer-866 | RINWR | 11 | 1166 | 5mer-1166 | KTHEK | 32 |
| 867 | 5mer-867 | KDSWK | 14 | 1167 | 5mer-1167 | KESWK | 12 |
| 868 | 5mer-868 | KMHFK | 18 | 1168 | 5mer-1168 | RHHWR | 31 |
| 869 | 5mer-869 | KKHPK | 31 | 1169 | 5mer-1169 | KDTPK | 29 |
| 870 | 5mer-870 | RCKVK | 25 | 1170 | 5mer-1170 | KHSEK | 28 |
| 871 | 5mer-871 | RHSHR | 21 | 1171 | 5mer-1171 | RCSWK | 21 |
| 872 | 5mer-872 | RKKWK | 29 | 1172 | 5mer-1172 | KIWWR | 25 |
| 873 | 5mer-873 | RYNFR | 32 | 1173 | 5mer-1173 | KECKR | 30 |
| 874 | 5mer-874 | RIHMR | 27 | 1174 | 5mer-1174 | KYSGK | 25 |
| 875 | 5mer-875 | KHCNK | 33 | 1175 | 5mer-1175 | RDMIR | 30 |
| 876 | 5mer-876 | KETAR | 16 | 1176 | 5mer-1176 | KIHFK | 25 |
| 877 | 5mer-877 | RFSMR | 17 | 1177 | 5mer-1177 | KIPVR | 20 |
| 878 | 5mer-878 | KHTER | 24 | 1178 | 5mer-1178 | RFDNR | 22 |
| 879 | 5mer-879 | KDCMK | 13 | 1179 | 5mer-1179 | RMNVR | 18 |
| 880 | 5mer-880 | RCDKK | 17 | 1180 | 5mer-1180 | KETAK | 27 |
| 881 | 5mer-881 | RNDAK | 31 | 1181 | 5mer-1181 | KKAKR | 22 |
| 882 | 5mer-882 | REEGR | 18 | 1182 | 5mer-1182 | REKWK | 15 |
| 883 | 5mer-883 | KMSAK | 16 | 1183 | 5mer-1183 | RHAPK | 13 |
| 884 | 5mer-884 | KIWEK | 28 | 1184 | 5mer-1184 | RDSMK | 14 |
| 885 | 5mer-885 | RHCNR | 19 | 1185 | 5mer-1185 | KPTGR | 30 |
| 886 | 5mer-886 | RMMFR | 21 | 1186 | 5mer-1186 | KMWVK | 12 |
| 887 | 5mer-887 | KTPVR | 30 | 1187 | 5mer-1187 | KHHIR | 27 |
| 888 | 5mer-888 | KKCIR | 31 | 1188 | 5mer-1188 | KPSGK | 30 |
| 889 | 5mer-889 | KTPGR | 25 | 1189 | 5mer-1189 | RKMDK | 11 |
| 890 | 5mer-890 | KKHFK | 33 | 1190 | 5mer-1190 | RFSEK | 32 |
| 891 | 5mer-891 | RKKMK | 24 | 1191 | 5mer-1191 | RMDWK | 30 |
| 892 | 5mer-892 | RKPMR | 29 | 1192 | 5mer-1192 | RYAKK | 28 |
| 893 | 5mer-893 | RIKIK | 18 | 1193 | 5mer-1193 | KHWFK | 22 |
| 894 | 5mer-894 | KMSPR | 18 | 1194 | 5mer-1194 | RDNGK | 18 |
| 895 | 5mer-895 | RFTKK | 18 | 1195 | 5mer-1195 | RHWEK | 19 |
| 896 | 5mer-896 | RYHWR | 27 | 1196 | 5mer-1196 | RICIR | 24 |
| 897 | 5mer-897 | KFCER | 30 | 1197 | 5mer-1197 | KDDAR | 24 |
| 898 | 5mer-898 | RYCMR | 20 | 1198 | 5mer-1198 | RAADK | 25 |
| 899 | 5mer-899 | RYTFR | 31 | 1199 | 5mer-1199 | KNNNR | 29 |
| 900 | 5mer-900 | RHSVK | 29 | 1200 | 5mer-1200 | RKNEK | 16 |

| | |
|---|---|
| Average Binding affinity | 21.8 |

TABLE 10
6mer-1 Top sequence

| SEQ ID | Unique | | Binding |
|---|---|---|---|
| NO: | No. | Sequence | affinity |
| 1201 | 6mer-1-1 | KKVISK | 122 |
| 1202 | 6mer-1-2 | RKQILR | 142 |
| 1203 | 6mer-1-3 | RKRRSR | 154 |
| 1204 | 6mer-1-4 | RKSFYK | 139 |
| 1205 | 6mer-1-5 | KRQIRK | 135 |
| 1206 | 6mer-1-6 | RKSRCK | 153 |
| 1207 | 6mer-1-7 | KRQYSK | 126 |
| 1208 | 6mer-1-8 | RKRRRK | 125 |
| 1209 | 6mer-1-9 | RKSFCK | 154 |
| 1210 | 6mer-1- | KRWRLK | 139 |
| | 10 | | |
| 1211 | 6mer-1- | KRQFTK | 139 |
| | 11 | | |
| 1212 | 6mer-1- | KKQICK | 128 |
| | 12 | | |
| 1213 | 6mer-1- | KRQIQR | 147 |
| | 13 | | |
| 1214 | 6mer-1- | RKRFLK | 145 |
| | 14 | | |
| 1215 | 6mer-1- | KRQICK | 123 |
| | 15 | | |
| 1216 | 6mer-1- | KKQYCR | 136 |
| | 16 | | |
| 1217 | 6mer-1- | KRVQCR | 135 |
| | 17 | | |
| 1218 | 6mer-1- | KKQFTR | 145 |
| | 18 | | |
| 1219 | 6mer-1- | KRSFYR | 135 |
| | 19 | | |
| 1220 | 6mer-1- | KKSRYK | 147 |
| | 20 | | |
| 1221 | 6mer-1- | RKWYLK | 137 |
| | 21 | | |
| 1222 | 6mer-1- | RKRLCK | 126 |
| | 22 | | |
| 1223 | 6mer-1- | KRSVSR | 153 |
| | 23 | | |
| 1224 | 6mer-1- | RKVIRK | 142 |
| | 24 | | |
| 1225 | 6mer-1- | KKLIRR | 135 |
| | 25 | | |
| 1226 | 6mer-1- | KKRVLR | 123 |
| | 26 | | |
| 1227 | 6mer-1- | KRSFTK | 142 |
| | 27 | | |
| 1228 | 6mer-1- | RRWISK | 125 |
| | 28 | | |
| 1229 | 6mer-1- | KRLISR | 124 |
| | 29 | | |
| 1230 | 6mer-1- | RRQVRR | 154 |
| | 30 | | |
| 1231 | 6mer-1- | KRLYCR | 121 |
| | 31 | | |
| 1232 | 6mer-1- | RKGQCR | 121 |
| | 32 | | |
| 1233 | 6mer-1- | KKSYCR | 154 |
| | 33 | | |
| 1234 | 6mer-1- | RKWLYK | 135 |
| | 34 | | |
| 1235 | 6mer-1- | RRGRQR | 136 |
| | 35 | | |
| 1236 | 6mer-1- | RKWQQK | 124 |
| | 36 | | |
| 1237 | 6mer-1- | KKWVLR | 121 |
| | 37 | | |
| 1238 | 6mer-1- | RRQQTK | 126 |
| | 38 | | |
| 1239 | 6mer-1- | RKVYQK | 139 |
| | 39 | | |
| 1240 | 6mer-1- | KRSQYK | 121 |
| | 40 | | |
| 1241 | 6mer-1- | RKGITK | 122 |
| | 41 | | |
| 1242 | 6mer-1- | KKRIQR | 139 |
| | 42 | | |
| 1243 | 6mer-1- | RKRIRR | 548 |
| | 43 | | |
| 1244 | 6mer-1- | KRQYCK | 148 |
| | 44 | | |
| 1245 | 6mer-1- | RKGLTK | 145 |
| | 45 | | |
| 1246 | 6mer-1- | KRLYQR | 142 |
| | 46 | | |
| 1247 | 6mer-1- | KRRLLK | 149 |
| | 47 | | |
| 1248 | 6mer-1- | RRWVRR | 124 |
| | 48 | | |
| 1249 | 6mer-1- | RRWQTR | 149 |
| | 49 | | |
| 1250 | 6mer-1- | KKVRTR | 139 |
| | 50 | | |
| 1251 | 6mer-1- | RRVLYK | 127 |
| | 51 | | |
| 1252 | 6mer-1- | RRRFLR | 131 |
| | 52 | | |
| 1253 | 6mer-1- | KRVIQR | 123 |
| | 53 | | |
| 1254 | 6mer-1- | RRRVCK | 144 |
| | 54 | | |
| 1255 | 6mer-1- | KRSIYR | 133 |
| | 55 | | |
| 1256 | 6mer-1- | RRGIQR | 137 |
| | 56 | | |
| 1257 | 6mer-1- | RKQYYK | 139 |
| | 57 | | |
| 1258 | 6mer-1- | RKSVTR | 126 |
| | 58 | | |
| 1259 | 6mer-1- | KRLQCK | 145 |
| | 59 | | |
| 1260 | 6mer-1- | RKSIQK | 139 |
| | 60 | | |
| 1261 | 6mer-1- | KRSYCK | 121 |
| | 61 | | |
| 1262 | 6mer-1- | RRWFTK | 133 |
| | 62 | | |
| 1263 | 6mer-1- | KKWVSR | 148 |
| | 63 | | |
| 1264 | 6mer-1- | RKQFTK | 154 |
| | 64 | | |
| 1265 | 6mer-1- | KKSRRR | 121 |
| | 65 | | |
| 1266 | 6mer-1- | KKSISR | 147 |
| | 66 | | |
| 1267 | 6mer-1- | RRSYTR | 135 |
| | 67 | | |
| 1268 | 6mer-1- | RKLQLK | 153 |
| | 68 | | |
| 1269 | 6mer-1- | RKVRRR | 142 |
| | 69 | | |
| 1270 | 6mer-1- | KKLL YR | 139 |
| | 70 | | |
| 1271 | 6mer-1- | KRWFYK | 121 |
| | 71 | | |
| 1272 | 6mer-1- | RKVQLK | 139 |
| | 72 | | |
| 1273 | 6mer-1- | KKQQQR | 142 |
| | 73 | | |
| 1274 | 6mer-1- | KKVRLR | 142 |
| | 74 | | |
| 1275 | 6mer-1- | RRQYQK | 139 |
| | 75 | | |
| 1276 | 6mer-1- | RRLQLK | 126 |
| | 76 | | |
| 1277 | 6mer-1- | KKQLRR | 149 |
| | 77 | | |
| 1278 | 6mer-1- | KKRVSK | 145 |
| | 78 | | |
| 1279 | 6mer-1- | KRLFCK | 137 |
| | 79 | | |
| 1280 | 6mer-1- | KRVQQR | 133 |
| | 80 | | |
| 1281 | 6mer-1- | RRWQLR | 148 |
| | 81 | | |
| 1282 | 6mer-1- | KKVLYR | 123 |
| | 82 | | |
| 1283 | 6mer-1- | RRSFLR | 146 |
| | 83 | | |
| 1284 | 6mer-1- | RRGQTK | 142 |
| | 84 | | |
| 1285 | 6mer-1- | RKRQCK | 121 |
| | 85 | | |
| 1286 | 6mer-1- | KKWRQK | 142 |
| | 86 | | |
| 1287 | 6mer-1- | KKQVYK | 139 |
| | 87 | | |
| 1288 | 6mer-1- | KRWICK | 121 |
| | 88 | | |
| 1289 | 6mer-1- | RKQRCK | 142 |
| | 89 | | |
| 1290 | 6mer-1- | KKGISK | 125 |
| | 90 | | |
| 1291 | 6mer-1- | RKQQCK | 131 |
| | 91 | | |
| 1292 | 6mer-1- | RRWRLK | 153 |
| | 92 | | |
| 1293 | 6mer-1- | KRWIRR | 136 |
| | 93 | | |
| 1294 | 6mer-1- | RKVQQK | 142 |
| | 94 | | |
| 1295 | 6mer-1- | KKWQTK | 142 |
| | 95 | | |
| 1296 | 6mer-1- | KRGVRK | 125 |
| | 96 | | |
| 1297 | 6mer-1- | KKVYLR | 139 |
| | 97 | | |
| 1298 | 6mer-1- | KRLQCR | 154 |
| | 98 | | |
| 1299 | 6mer-1- | RKVVYR | 136 |
| | 99 | | |
| 1300 | 6mer-1- | RKWISK | 146 |
| | 100 | | |
| 1301 | 6mer-1- | KRWLYR | 142 |
| | 101 | | |
| 1302 | 6mer-1- | RRRYRR | 127 |
| | 102 | | |
| 1303 | 6mer-1- | RKRICK | 122 |
| | 103 | | |
| 1304 | 6mer-1- | KRGFSK | 121 |
| | 104 | | |
| 1305 | 6mer-1- | KKSISK | 141 |
| | 105 | | |
| 1306 | 6mer-1- | KRGQLK | 149 |
| | 106 | | |
| 1307 | 6mer-1- | KKQRSR | 131 |
| | 107 | | |
| 1308 | 6mer-1- | RRLLLR | 139 |
| | 108 | | |
| 1309 | 6mer-1- | KKRYLR | 148 |
| | 109 | | |
| 1310 | 6mer-1- | KRQLLK | 121 |
| | 110 | | |
| 1311 | 6mer-1- | RKVICR | 144 |
| | 111 | | |
| 1312 | 6mer-1- | KKWVCR | 148 |
| | 112 | | |
| 1313 | 6mer-1- | KRGVQK | 148 |
| | 113 | | |
| 1314 | 6mer-1- | RRQITK | 153 |
| | 114 | | |
| 1315 | 6mer-1- | RRSLSR | 133 |
| | 115 | | |
| 1316 | 6mer-1- | RKVRCK | 139 |
| | 116 | | |
| 1317 | 6mer-1- | KRLFTR | 142 |
| | 117 | | |
| 1318 | 6mer-1- | RKLQLR | 127 |
| | 118 | | |
| 1319 | 6mer-1- | KRLQTR | 133 |
| | 119 | | |
| 1320 | 6mer-1- | RRRYSR | 124 |
| | 120 | | |
| 1321 | 6mer-1- | KRRYTK | 148 |
| | 121 | | |
| 1322 | 6mer-1- | KKLIRK | 139 |
| | 122 | | |
| 1323 | 6mer-1- | RRGVQK | 148 |
| | 123 | | |
| 1324 | 6mer-1- | KRVQQK | 137 |
| | 124 | | |
| 1325 | 6mer-1- | KRRLCR | 135 |
| | 125 | | |
| 1326 | 6mer-1- | KKWIQR | 148 |
| | 126 | | |
| 1327 | 6mer-1- | KRVIYR | 147 |
| | 127 | | |
| 1328 | 6mer-1- | RKQFYR | 126 |
| | 128 | | |
| 1329 | 6mer-1- | RRRQSK | 121 |
| | 129 | | |
| 1330 | 6mer-1- | RKQVLR | 142 |
| | 130 | | |
| 1331 | 6mer-1- | KRGIQR | 142 |
| | 131 | | |
| 1332 | 6mer-1- | RRQVYR | 153 |
| | 132 | | |
| 1333 | 6mer-1- | RKRFLR | 154 |
| | 133 | | |
| 1334 | 6mer-1- | KKSIYR | 128 |
| | 134 | | |
| 1335 | 6mer-1- | KRQVSR | 123 |
| | 135 | | |
| 1336 | 6mer-1- | RRWLYK | 148 |
| | 136 | | |
| 1337 | 6mer-1- | RRLFRR | 121 |
| | 137 | | |
| 1338 | 6mer-1- | RKVVTR | 124 |
| | 138 | | |
| 1339 | 6mer-1- | KRRFLR | 122 |
| | 139 | | |
| 1340 | 6mer-1- | KRQVQR | 148 |
| | 140 | | |
| 1341 | 6mer-1- | RKLYQK | 141 |
| | 141 | | |
| 1342 | 6mer-1- | KKVYYK | 123 |
| | 142 | | |
| 1343 | 6mer-1- | KRGVLR | 145 |
| | 143 | | |
| 1344 | 6mer-1- | RKRYTR | 148 |
| | 144 | | |
| 1345 | 6mer-1- | RKVFQR | 141 |
| | 145 | | |
| 1346 | 6mer-1- | KRGRRR | 139 |
| | 146 | | |
| 1347 | 6mer-1- | KKQIQR | 125 |
| | 147 | | |
| 1348 | 6mer-1- | RKLRCR | 146 |
| | 148 | | |
| 1349 | 6mer-1- | RRWVCK | 131 |
| | 149 | | |
| 1350 | 6mer-1- | RKRQCR | 142 |
| | 150 | | |
| 1351 | 6mer-1- | KRGVRR | 145 |
| | 151 | | |
| 1352 | 6mer-1- | KRVIRR | 154 |
| | 152 | | |
| 1353 | 6mer-1- | KKWQQR | 146 |
| | 153 | | |
| 1354 | 6mer-1- | KKLYSR | 153 |
| | 154 | | |
| 1355 | 6mer-1- | RRVRSR | 127 |
| | 155 | | |
| 1356 | 6mer-1- | RRSVTK | 154 |
| | 156 | | |
| 1357 | 6mer-1- | KKSLLR | 123 |
| | 157 | | |
| 1358 | 6mer-1- | RRLIYR | 131 |
| | 158 | | |
| 1359 | 6mer-1- | KRLRRK | 139 |
| | 159 | | |
| 1360 | 6mer-1- | RRVIQR | 149 |
| | 160 | | |
| 1361 | 6mer-1- | KRRYCK | 139 |
| | 161 | | |
| 1362 | 6mer-1- | KKSLSK | 142 |
| | 162 | | |
| 1363 | 6mer-1- | KRLQTK | 147 |
| | 163 | | |
| 1364 | 6mer-1- | KRGQYK | 145 |
| | 164 | | |
| 1365 | 6mer-1- | KKWFTK | 148 |
| | 165 | | |
| 1366 | 6mer-1- | RRWYSK | 148 |
| | 166 | | |
| 1367 | 6mer-1- | RRRYQR | 122 |
| | 167 | | |
| 1368 | 6mer-1- | KRWFCK | 131 |
| | 168 | | |
| 1369 | 6mer-1- | RRQQSK | 153 |
| | 169 | | |
| 1370 | 6mer-1- | RKSFYR | 148 |
| | 170 | | |
| 1371 | 6mer-1- | RKQFQK | 123 |
| | 171 | | |
| 1372 | 6mer-1- | RRLIRK | 153 |
| | 172 | | |
| 1373 | 6mer-1- | RKQYYR | 123 |
| | 173 | | |
| 1374 | 6mer-1- | KKGVCR | 154 |
| | 174 | | |
| 1375 | 6mer-1- | RRRIQK | 137 |
| | 175 | | |
| 1376 | 6mer-1- | KKVYCK | 121 |
| | 176 | | |
| 1377 | 6mer-1- | KRGYRR | 121 |
| | 177 | | |
| 1378 | 6mer-1- | RKRYQK | 139 |
| | 178 | | |
| 1379 | 6mer-1- | KRSQYR | 148 |
| | 179 | | |
| 1380 | 6mer-1- | RKLVRK | 146 |
| | 180 | | |
| 1381 | 6mer-1- | KKGVLR | 148 |
| | 181 | | |
| 1382 | 6mer-1- | KRGICK | 147 |
| | 182 | | |
| 1383 | 6mer-1- | KKGQTR | 121 |
| | 183 | | |
| 1384 | 6mer-1- | KRQICR | 139 |
| | 184 | | |
| 1385 | 6mer-1- | KRQLRK | 153 |
| | 185 | | |
| 1386 | 6mer-1- | RRRVYK | 147 |
| | 186 | | |
| 1387 | 6mer-1- | RKLFYK | 139 |
| | 187 | | |
| 1388 | 6mer-1- | RKSLQK | 122 |
| | 188 | | |
| 1389 | 6mer-1- | KKSYSK | 137 |
| | 189 | | |
| 1390 | 6mer-1- | RKLYYR | 153 |
| | 190 | | |
| 1391 | 6mer-1- | KKQILK | 139 |
| | 191 | | |
| 1392 | 6mer-1- | KRQYQR | 127 |
| | 192 | | |
| 1393 | 6mer-1- | KRVQLK | 149 |
| | 193 | | |
| 1394 | 6mer-1- | RKWQRR | 144 |
| | 194 | | |
| 1395 | 6mer-1- | KRGISR | 122 |
| | 195 | | |
| 1396 | 6mer-1- | RKWRRK | 142 |
| | 196 | | |
| 1397 | 6mer-1- | RRSIRR | 139 |
| | 197 | | |
| 1398 | 6mer-1- | KRLFCR | 148 |
| | 198 | | |
| 1399 | 6mer-1- | KKQVQK | 151 |
| | 199 | | |
| 1400 | 6mer-1- | RKLYQR | 142 |
| | 200 | | |
| 1401 | 6mer-1- | RRRIQR | 151 |
| | 201 | | |
| 1402 | 6mer-1- | RRQLTK | 154 |
| | 202 | | |
| 1403 | 6mer-1- | RRQITR | 142 |
| | 203 | | |
| 1404 | 6mer-1- | KKRQRR | 154 |
| | 204 | | |
| 1405 | 6mer-1- | KRWRLR | 133 |
| | 205 | | |
| 1406 | 6mer-1- | RRLQTR | 121 |
| | 206 | | |
| 1407 | 6mer-1- | KKSQQR | 151 |
| | 207 | | |
| 1408 | 6mer-1- | KRSIQR | 122 |
| | 208 | | |
| 1409 | 6mer-1- | RKGYTR | 121 |
| | 209 | | |
| 1410 | 6mer-1- | RRGVRR | 184 |
| | 210 | | |
| 1411 | 6mer-1- | KKQLLR | 123 |
| | 211 | | |
| 1412 | 6mer-1- | RRRICR | 148 |
| | 212 | | |
| 1413 | 6mer-1- | KRRVRK | 127 |
| | 213 | | |
| 1414 | 6mer-1- | RRSYCK | 139 |
| | 214 | | |
| 1415 | 6mer-1- | RKRYSR | 136 |
| | 215 | | |
| 1416 | 6mer-1- | RKSIQR | 148 |
| | 216 | | |
| 1417 | 6mer-1- | KRVLQR | 135 |
| | 217 | | |
| 1418 | 6mer-1- | KKQVTR | 126 |
| | 218 | | |
| 1419 | 6mer-1- | RRLFCR | 121 |
| | 219 | | |
| 1420 | 6mer-1- | KRQRQK | 148 |
| | 220 | | |
| 1421 | 6mer-1- | KKWFQR | 148 |
| | 221 | | |
| 1422 | 6mer-1- | RRRVRR | 145 |
| | 222 | | |
| 1423 | 6mer-1- | KKRRRK | 133 |
| | 223 | | |
| 1424 | 6mer-1- | KRGFLR | 142 |
| | 224 | | |
| 1425 | 6mer-1- | RKLICK | 142 |
| | 1225 | | |
| 1426 | 6mer-1- | RRWITR | 128 |
| | 226 | | |
| 1427 | 6mer-1- | KRLVQK | 139 |
| | 227 | | |
| 1428 | 6mer-1- | KRVIYK | 139 |
| | 228 | | |
| 1429 | 6mer-1- | RRRLLR | 153 |
| | 229 | | |
| 1430 | 6mer-1- | RKGYCK | 128 |
| | 230 | | |
| 1431 | 6mer-1- | KRQRTK | 136 |
| | 231 | | |
| 1432 | 6mer-1- | RRRICK | 146 |
| | 232 | | |
| 1433 | 6mer-1- | KKWQSR | 128 |
| | 233 | | |
| 1434 | 6mer-1- | RRGISR | 142 |
| | 234 | | |
| 1435 | 6mer-1- | KKRYCR | 148 |
| | 235 | | |
| 1436 | 6mer-1- | RKLISR | 151 |
| | 236 | | |
| 1437 | 6mer-1- | RKSRYK | 137 |
| | 237 | | |
| 1438 | 6mer-1- | KKGQQK | 154 |
| | 238 | | |
| 1439 | 6mer-1- | RKVLCR | 136 |
| | 239 | | |
| 1440 | 6mer-1- | RRSRRR | 148 |
| | 240 | | |
| 1441 | 6mer-1- | RRLYYK | 148 |
| | 241 | | |
| 1442 | 6mer-1- | KRQYLK | 148 |
| | 242 | | |
| 1443 | 6mer-1- | KKWYLR | 136 |
| | 243 | | |
| 1444 | 6mer-1- | RRRVQK | 144 |
| | 244 | | |
| 1445 | 6mer-1- | RRGFRR | 142 |
| | 245 | | |
| 1446 | 6mer-1- | RRLVSR | 122 |
| | 246 | | |
| 1447 | 6mer-1- | KKVRQK | 122 |
| | 247 | | |
| 1448 | 6mer-1- | RRLIYK | 151 |
| | 248 | | |
| 1449 | 6mer-1- | RKGVSR | 142 |
| | 249 | | |
| 1450 | 6mer-1- | RRVICR | 142 |
| | 250 | | |
| 1451 | 6mer-1- | RKVQSK | 133 |
| | 251 | | |
| 1452 | 6mer-1- | RRWIRR | 131 |
| | 252 | | |
| 1453 | 6mer-1- | RRVQLK | 145 |
| | 253 | | |
| 1454 | 6mer-1- | RKSLSK | 137 |
| | 254 | | |
| 1455 | 6mer-1- | KKGFQK | 139 |
| | 255 | | |
| 1456 | 6mer-1- | KRVRTK | 125 |
| | 256 | | |
| 1457 | 6mer-1- | RKWVTR | 124 |
| | 257 | | |
| 1458 | 6mer-1- | KKLQYK | 137 |
| | 258 | | |
| 1459 | 6mer-1- | KRRYRK | 141 |
| | 259 | | |
| 1460 | 6mer-1- | RKQRTK | 141 |
| | 260 | | |
| 1461 | 6mer-1- | KRWVTR | 121 |
| | 261 | | |
| 1462 | 6mer-1- | RKQLQR | 139 |
| | 262 | | |
| 1463 | 6mer-1- | RKSYTK | 146 |
| | 263 | | |
| 1464 | 6mer-1- | RRQYQR | 128 |
| | 264 | | |
| 1465 | 6mer-1- | RKSVCR | 145 |
| | 265 | | |
| 1466 | 6mer-1- | KKGRLK | 144 |
| | 266 | | |
| 1467 | 6mer-1- | KRRLLR | 139 |
| | 267 | | |
| 1468 | 6mer-1- | KRRQSK | 144 |
| | 268 | | |
| 1469 | 6mer-1- | RKRRQR | 142 |
| | 269 | | |
| 1470 | 6mer-1- | KRGLRR | 149 |
| | 270 | | |
| 1471 | 6mer-1- | RRQVSK | 122 |
| | 271 | | |
| 1472 | 6mer-1- | KKQVSR | 139 |
| | 272 | | |
| 1473 | 6mer-1- | KKQVSK | 137 |
| | 273 | | |
| 1474 | 6mer-1- | KRLLYK | 135 |
| | 1274 | | |
| 1475 | 6mer-1- | RKRVLK | 123 |
| | 275 | | |
| 1476 | 6mer-1- | RRVICK | 128 |
| | 276 | | |
| 1477 | 6mer-1- | KKGLCR | 141 |
| | 277 | | |
| 1478 | 6mer-1- | KRQQTR | 142 |
| | 278 | | |
| 1479 | 6mer-1- | RRLRYR | 145 |
| | 279 | | |
| 1480 | 6mer-1- | RKLQCK | 149 |
| | 280 | | |
| 1481 | 6mer-1- | KRLLCR | 154 |
| | 281 | | |
| 1482 | 6mer-1- | RRRRYR | 121 |
| | 282 | | |
| 1483 | 6mer-1- | KKWVQK | 133 |
| | 283 | | |
| 1484 | 6mer-1- | KRSRQK | 145 |
| | 284 | | |
| 1485 | 6mer-1- | KRWVQR | 122 |
| | 285 | | |
| 1486 | 6mer-1- | RKLISK | 139 |
| | 286 | | |
| 1487 | 6mer-1- | RKWLTR | 136 |
| | 287 | | |
| 1488 | 6mer-1- | KKVQQR | 148 |
| | 288 | | |
| 1489 | 6mer-1- | RKRYYR | 153 |
| | 289 | | |
| 1490 | 6mer-1- | RKQLTK | 146 |
| | 290 | | |
| 1491 | 6mer-1- | KKQIRK | 142 |
| | 291 | | |
| 1492 | 6mer-1- | RKWQTK | 122 |
| | 292 | | |
| 1493 | 6mer-1- | RKRVCK | 154 |
| | 293 | | |
| 1494 | 6mer-1- | KKLYRR | 123 |
| | 294 | | |
| 1495 | 6mer-1- | KRQRCR | 148 |
| | 295 | | |
| 1496 | 6mer-1- | RKSIRR | 121 |
| | 296 | | |
| 1497 | 6mer-1- | RRGFSK | 139 |
| | 297 | | |
| 1498 | 6mer-1- | KKLYCK | 147 |
| | 298 | | |
| 1499 | 6mer-1- | KRWLSK | 139 |
| | 299 | | |
| 1500 | 6mer-1- | RRWQQK | 148 |
| | 300 | | |
| 1501 | 6mer-1- | RRSILR | 154 |
| | 301 | | |
| 1502 | 6mer-1- | RRGQSR | 151 |
| | 302 | | |
| 1503 | 6mer-1- | RKQYCK | 123 |
| | 303 | | |
| 1504 | 6mer-1- | RKLYSR | 121 |
| | 304 | | |
| 1505 | 6mer-1- | RKWISR | 153 |
| | 305 | | |
| 1506 | 6mer-1- | KKLFYR | 135 |
| | 306 | | |
| 1507 | 6mer-1- | KRWYRR | 153 |
| | 307 | | |
| 1508 | 6mer-1- | KRRITR | 135 |
| | 308 | | |
| 1509 | 6mer-1- | KKGICK | 153 |
| | 309 | | |
| 1510 | 6mer-1- | RKRQLK | 127 |
| | 310 | | |
| 1511 | 6mer-1- | RRGYQK | 127 |
| | 311 | | |
| 1512 | 6mer-1- | KKSRQK | 151 |
| | 312 | | |
| 1513 | 6mer-1- | RRWFCK | 148 |
| | 313 | | |
| 1514 | 6mer-1- | RRRILR | 141 |
| | 314 | | |
| 1515 | 6mer-1- | RKQQTK | 128 |
| | 315 | | |
| 1516 | 6mer-1- | RKQIRK | 145 |
| | 316 | | |
| 1517 | 6mer-1- | KRSFRR | 148 |
| | 317 | | |
| 1518 | 6mer-1- | KKSRRK | 145 |
| | 318 | | |
| 1519 | 6mer-1- | KRWVQK | 123 |
| | 319 | | |
| 1520 | 6mer-1- | KRVQYR | 121 |
| | 320 | | |
| 1521 | 6mer-1- | RKQVRR | 154 |
| | 321 | | |
| 1522 | 6mer-1- | KRGVQR | 146 |
| | 322 | | |
| 1523 | 6mer-1- | RRWLYR | 149 |
| | 323 | | |
| 1524 | 6mer-1- | RRLQRR | 128 |
| | 324 | | |
| 1525 | 6mer-1- | RRQIQR | 142 |
| | 325 | | |
| 1526 | 6mer-1- | RKWIYK | 136 |
| | 326 | | |
| 1527 | 6mer-1- | KRGITR | 139 |
| | 327 | | |
| 1528 | 6mer-1- | KRWLQK | 151 |
| | 328 | | |
| 1529 | 6mer-1- | RKWRQK | 123 |
| | 329 | | |
| 1530 | 6mer-1- | RKVQRK | 148 |
| | 330 | | |
| 1531 | 6mer-1- | RKRITR | 128 |
| | 331 | | |
| 1532 | 6mer-1- | KKRVQK | 122 |
| | 332 | | |
| 1533 | 6mer-1- | RKRQSR | 135 |
| | 333 | | |
| 1534 | 6mer-1- | RRRRLR | 154 |
| | 334 | | |
| 1535 | 6mer-1- | RRSQRR | 148 |
| | 335 | | |
| 1536 | 6mer-1- | KRVVTK | 154 |
| | 336 | | |
| 1537 | 6mer-1- | RKSRRR | 144 |
| | 337 | | |
| 1538 | 6mer-1- | KKQVLK | 127 |
| | 338 | | |
| 1539 | 6mer-1- | KKSIQK | 147 |
| | 339 | | |
| 1540 | 6mer-1- | KRLLCK | 142 |
| | 340 | | |
| 1541 | 6mer-1- | RKQQQR | 128 |
| | 341 | | |
| 1542 | 6mer-1- | RKRFCR | 131 |
| | 342 | | |
| 1543 | 6mer-1- | KKLYTK | 135 |
| | 343 | | |
| 1544 | 6mer-1- | KKSQCR | 125 |
| | 344 | | |
| 1545 | 6mer-1- | KKLLCR | 147 |
| | 345 | | |
| 1546 | 6mer-1- | KKRIYR | 123 |
| | 346 | | |
| 1547 | 6mer-1- | KKQQSK | 126 |
| | 347 | | |
| 1548 | 6mer-1- | RKQRLK | 142 |
| | 348 | | |
| 1549 | 6mer-1- | KRLYSK | 123 |
| | 349 | | |
| 1550 | 6mer-1- | KKLQTK | 153 |
| | 350 | | |
| 1551 | 6mer-1- | RRGLRK | 141 |
| | 351 | | |
| 1552 | 6mer-1- | RKVFRK | 142 |
| | 352 | | |
| 1553 | 6mer-1- | KRLYLK | 126 |
| | 353 | | |
| 1554 | 6mer-1- | KKVFLK | 153 |
| | 354 | | |
| 1555 | 6mer-1- | RKVFYR | 148 |
| | 355 | | |
| 1556 | 6mer-1- | KRGYSK | 153 |
| | 356 | | |
| 1557 | 6mer-1- | KRRQTR | 148 |
| | 357 | | |
| 1558 | 6mer-1- | KRRYTR | 124 |
| | 358 | | |
| 1559 | 6mer-1- | KRQFLR | 131 |
| | 359 | | |
| 1560 | 6mer-1- | KRVFLK | 148 |
| | 360 | | |
| 1561 | 6mer-1- | RKSVQR | 127 |
| | 361 | | |
| 1562 | 6mer-1- | KRVVYK | 133 |
| | 362 | | |
| 1563 | 6mer-1- | KRQIRR | 121 |
| | 363 | | |
| 1564 | 6mer-1- | RKRQSK | 124 |
| | 364 | | |
| 1565 | 6mer-1- | KKRICK | 142 |
| | 365 | | |
| 1566 | 6mer-1- | KRWFCR | 133 |
| | 366 | | |
| 1567 | 6mer-1- | RKGFSK | 154 |
| | 367 | | |
| 1568 | 6mer-1- | RRRFSK | 145 |
| | 368 | | |
| 1569 | 6mer-1- | KKWYRK | 144 |
| | 369 | | |
| 1570 | 6mer-1- | RKQLYK | 142 |
| | 370 | | |
| 1571 | 6mer-1- | KRSLTR | 153 |
| | 371 | | |
| 1572 | 6mer-1- | RKLRSK | 145 |
| | 372 | | |
| 1573 | 6mer-1- | KRGVLK | 149 |
| | 373 | | |
| 1574 | 6mer-1- | KKQFQK | 148 |
| | 374 | | |
| 1575 | 6mer-1- | RRVFYR | 154 |
| | 375 | | |
| 1576 | 6mer-1- | RRQLRK | 121 |
| | 376 | | |
| 1577 | 6mer-1- | KRWITR | 148 |
| | 377 | | |
| 1578 | 6mer-1- | KRSLQK | 153 |
| | 378 | | |
| 1579 | 6mer-1- | KRRISK | 153 |
| | 379 | | |
| 1580 | 6mer-1- | KRLQLR | 121 |
| | 380 | | |
| 1581 | 6mer-1- | RKGFYR | 124 |
| | 381 | | |
| 1582 | 6mer-1- | KRQYTR | 139 |
| | 382 | | |
| 1583 | 6mer-1- | RKRRTK | 148 |
| | 383 | | |
| 1584 | 6mer-1- | RKVICK | 148 |
| | 384 | | |
| 1585 | 6mer-1- | KRQVLR | 127 |
| | 385 | | |
| 1586 | 6mer-1- | RRSYQK | 127 |
| | 386 | | |
| 1587 | 6mer-1- | KKGRLR | 148 |
| | 387 | | |
| 1588 | 6mer-1- | RRLLQR | 142 |
| | 388 | | |
| 1589 | 6mer-1- | RKLFCK | 125 |
| | 389 | | |
| 1590 | 6mer-1- | RKLQQR | 121 |
| | 390 | | |
| 1591 | 6mer-1- | RRQRCK | 131 |
| | 391 | | |
| 1592 | 6mer-1- | RRVQTR | 135 |
| | 392 | | |
| 1593 | 6mer-1- | KRLYYK | 148 |
| | 393 | | |
| 1594 | 6mer-1- | KKVRRR | 149 |
| | 394 | | |
| 1595 | 6mer-1- | KKRQTK | 125 |
| | 395 | | |
| 1596 | 6mer-1- | KRQIQK | 148 |
| | 396 | | |
| 1597 | 6mer-1- | KRLILR | 125 |
| | 397 | | |
| 1598 | 6mer-1- | KKQYYR | 137 |
| | 398 | | |
| 1599 | 6mer-1- | KRWILR | 125 |
| | 399 | | |
| 1600 | 6mer-1- | KRWQTK | 123 |
| | 400 | | |
| 1601 | 6mer-1- | RRLYCR | 127 |
| | 401 | | |
| 1602 | 6mer-1- | RRRVLR | 153 |
| | 402 | | |
| 1603 | 6mer-1- | KRSQTK | 153 |
| | 403 | | |
| 1604 | 6mer-1- | KKQRQK | 137 |
| | 404 | | |
| 1605 | 6mer-1- | KKVQTR | 148 |
| | 1405 | | |
| 1606 | 6mer-1- | RKVLLR | 153 |
| | 406 | | |
| 1607 | 6mer-1- | KRLRTR | 153 |
| | 407 | | |
| 1608 | 6mer-1- | KRGRSR | 147 |
| | 408 | | |
| 1609 | 6mer-1- | RRWISR | 144 |
| | 409 | | |
| 1610 | 6mer-1- | KRVLRK | 148 |
| | 410 | | |
| 1611 | 6mer-1- | RRQRSR | 121 |
| | 411 | | |
| 1612 | 6mer-1- | RKSILK | 139 |
| | 412 | | |
| 1613 | 6mer-1- | RKQFCR | 148 |
| | 413 | | |
| 1614 | 6mer-1- | KRSFLR | 153 |
| | 414 | | |
| 1615 | 6mer-1- | RRGVCR | 135 |
| | 415 | | |
| 1616 | 6mer-1- | RKLIYR | 153 |
| | 416 | | |
| 1617 | 6mer-1- | RKSVCK | 139 |
| | 417 | | |
| 1618 | 6mer-1- | RRQVRK | 123 |
| | 418 | | |
| 1619 | 6mer-1- | KRGFYR | 148 |
| | 419 | | |
| 1620 | 6mer-1- | KKGQYK | 148 |
| | 420 | | |
| 1621 | 6mer-1- | RKVLYR | 135 |
| | 421 | | |
| 1622 | 6mer-1- | KRVRQR | 154 |
| | 422 | | |
| 1623 | 6mer-1- | RRGYCK | 147 |
| | 423 | | |
| 1624 | 6mer-1- | RRRIYR | 135 |
| | 424 | | |
| 1625 | 6mer-1- | RKGVQK | 131 |
| | 425 | | |
| 1626 | 6mer-1- | KKGQYR | 131 |
| | 426 | | |
| 1627 | 6mer-1- | KRWVLR | 147 |
| | 427 | | |
| 1628 | 6mer-1- | KRVVLR | 139 |
| | 428 | | |
| 1629 | 6mer-1- | RRQRRK | 135 |
| | 429 | | |
| 1630 | 6mer-1- | KKQLQK | 144 |
| | 430 | | |
| 1631 | 6mer-1- | RRRFRR | 144 |
| | 431 | | |
| 1632 | 6mer-1- | RKGIQK | 139 |
| | 432 | | |
| 1633 | 6mer-1- | RKQQYR | 154 |
| | 433 | | |
| 1634 | 6mer-1- | KRWVCR | 137 |
| | 434 | | |
| 1635 | 6mer-1- | RKWRCK | 135 |
| | 435 | | |
| 1636 | 6mer-1- | KKLFYK | 148 |
| | 436 | | |
| 1637 | 6mer-1- | RKWFLK | 131 |
| | 437 | | |
| 1638 | 6mer-1- | RRGFQK | 142 |
| | 438 | | |
| 1639 | 6mer-1- | KRRQTK | 121 |
| | 439 | | |
| 1640 | 6mer-1- | KRVYSK | 153 |
| | 440 | | |
| 1641 | 6mer-1- | RRVYYR | 146 |
| | 441 | | |
| 1642 | 6mer-1- | RKLQYK | 131 |
| | 442 | | |
| 1643 | 6mer-1- | RKVLLK | 145 |
| | 443 | | |
| 1644 | 6mer-1- | KKWILK | 144 |
| | 444 | | |
| 1645 | 6mer-1- | KRVRLR | 145 |
| | 445 | | |
| 1646 | 6mer-1- | RRVIRR | 124 |
| | 446 | | |
| 1647 | 6mer-1- | RRRQQK | 146 |
| | 447 | | |
| 1648 | 6mer-1- | RKRFSR | 141 |
| | 448 | | |
| 1649 | 6mer-1- | KRGRCK | 135 |
| | 449 | | |
| 1650 | 6mer-1- | RKVVYK | 151 |
| | 450 | | |
| 1651 | 6mer-1- | RKVRLR | 153 |
| | 451 | | |
| 1652 | 6mer-1- | KRLYTR | 141 |
| | 452 | | |
| 1653 | 6mer-1- | KKWQQK | 154 |
| | 453 | | |
| 1654 | 6mer-1- | RKVLRR | 124 |
| | 454 | | |
| 1655 | 6mer-1- | RRVFYK | 126 |
| | 455 | | |
| 1656 | 6mer-1- | RRGQYR | 153 |
| | 456 | | |
| 1657 | 6mer-1- | RKLLCR | 121 |
| | 457 | | |
| 1658 | 6mer-1- | RKGQLK | 139 |
| | 1458 | | |
| 1659 | 6mer-1- | RRWVYK | 131 |
| | 459 | | |
| 1660 | 6mer-1- | RRGFYR | 148 |
| | 460 | | |
| 1661 | 6mer-1- | RRGYTR | 142 |
| | 461 | | |
| 1662 | 6mer-1- | RKQILK | 126 |
| | 462 | | |
| 1663 | 6mer-1- | KRSFRK | 153 |
| | 463 | | |
| 1664 | 6mer-1- | RRQRLK | 131 |
| | 464 | | |
| 1665 | 6mer-1- | RKQVYK | 154 |
| | 465 | | |
| 1666 | 6mer-1- | KRSICR | 148 |
| | 466 | | |
| 1667 | 6mer-1- | KRGYQK | 121 |
| | 467 | | |
| 1668 | 6mer-1- | RRLYRR | 153 |
| | 468 | | |
| 1669 | 6mer-1- | KKLIYR | 139 |
| | 469 | | |
| 1670 | 6mer-1- | KKWVYR | 148 |
| | 470 | | |
| 1671 | 6mer-1- | KKWRCK | 123 |
| | 471 | | |
| 1672 | 6mer-1- | KRQRCK | 142 |
| | 472 | | |
| 1673 | 6mer-1- | KKVLSK | 154 |
| | 473 | | |
| 1674 | 6mer-1- | KRLFSK | 121 |
| | 474 | | |
| 1675 | 6mer-1- | RKLQTK | 148 |
| | 475 | | |
| 1676 | 6mer-1- | KRRRQK | 154 |
| | 476 | | |
| 1677 | 6mer-1- | KRQQTK | 145 |
| | 477 | | |
| 1678 | 6mer-1- | RKVRYK | 139 |
| | 478 | | |
| 1679 | 6mer-1- | RRSLTR | 135 |
| | 479 | | |
| 1680 | 6mer-1- | KKQFYK | 121 |
| | 480 | | |
| 1681 | 6mer-1- | KRWRCK | 133 |
| | 481 | | |
| 1682 | 6mer-1- | RKQVRK | 133 |
| | 482 | | |
| 1683 | 6mer-1- | KRQVTK | 151 |
| | 483 | | |
| 1684 | 6mer-1- | KKLYLR | 154 |
| | 484 | | |
| 1685 | 6mer-1- | RRWYRR | 126 |
| | 485 | | |
| 1686 | 6mer-1- | KRQVRK | 151 |
| | 486 | | |
| 1687 | 6mer-1- | RKGRRK | 121 |
| | 487 | | |
| 1688 | 6mer-1- | KKWYSK | 135 |
| | 488 | | |
| 1689 | 6mer-1- | KKVITK | 148 |
| | 489 | | |
| 1690 | 6mer-1- | KKLFRR | 133 |
| | 490 | | |
| 1691 | 6mer-1- | RKLRLR | 137 |
| | 491 | | |
| 1692 | 6mer-1- | RRWRQK | 139 |
| | 492 | | |
| 1693 | 6mer-1- | KRGYLR | 131 |
| | 493 | | |
| 1694 | 6mer-1- | KKLFSR | 128 |
| | 494 | | |
| 1695 | 6mer-1- | RKGFQR | 126 |
| | 495 | | |
| 1696 | 6mer-1- | RRVYQR | 148 |
| | 496 | | |
| 1697 | 6mer-1- | KRRQLR | 133 |
| | 497 | | |
| 1698 | 6mer-1- | RKRQQK | 139 |
| | 498 | | |
| 1699 | 6mer-1- | RKLFYR | 149 |
| | 499 | | |
| 1700 | 6mer-1- | RKLQSK | 151 |
| | 500 | | |
| 1701 | 6mer-1- | KRVLYK | 154 |
| | 501 | | |
| 1702 | 6mer-1- | RKLFSR | 146 |
| | 502 | | |
| 1703 | 6mer-1- | KRRLCK | 151 |
| | 503 | | |
| 1704 | 6mer-1- | RRSITR | 122 |
| | 504 | | |
| 1705 | 6mer-1- | RRRFTR | 148 |
| | 505 | | |
| 1706 | 6mer-1- | RRRLSK | 151 |
| | 506 | | |
| 1707 | 6mer-1- | RRSQSK | 139 |
| | 507 | | |
| 1708 | 6mer-1- | RRQFSK | 135 |
| | 508 | | |
| 1709 | 6mer-1- | RKWLRK | 128 |
| | 509 | | |
| 1710 | 6mer-1- | KRRQSR | 122 |
| | 510 | | |
| 1711 | 6mer-1- | RKVYRR | 136 |
| | 511 | | |
| 1712 | 6mer-1- | RKWICK | 154 |
| | 512 | | |
| 1713 | 6mer-1- | RKQIRR | 154 |
| | 513 | | |
| 1714 | 6mer-1- | KKGRSK | 128 |
| | 514 | | |
| 1715 | 6mer-1- | RRGLSR | 139 |
| | 515 | | |
| 1716 | 6mer-1- | KKRFSR | 139 |
| | 516 | | |
| 1717 | 6mer-1- | KKGLCK | 139 |
| | 517 | | |
| 1718 | 6mer-1- | KRWVLK | 153 |
| | 518 | | |
| 1719 | 6mer-1- | KRRQCK | 147 |
| | 519 | | |
| 1720 | 6mer-1- | KRQIYK | 127 |
| | 520 | | |
| 1721 | 6mer-1- | RKVISR | 128 |
| | 521 | | |
| 1722 | 6mer-1- | RKRRLR | 126 |
| | 522 | | |
| 1723 | 6mer-1- | KRRRSK | 139 |
| | 523 | | |
| 1724 | 6mer-1- | KKGRQK | 148 |
| | 524 | | |
| 1725 | 6mer-1- | RRQLRR | 139 |
| | 525 | | |
| 1726 | 6mer-1- | KRGYTR | 148 |
| | 526 | | |
| 1727 | 6mer-1- | KKGIYR | 142 |
| | 527 | | |
| 1728 | 6mer-1- | KRSYTR | 139 |
| | 528 | | |
| 1729 | 6mer-1- | RRSLCK | 139 |
| | 529 | | |
| 1730 | 6mer-1- | KRLVSK | 137 |
| | 530 | | |
| 1731 | 6mer-1- | RKGQTK | 135 |
| | 531 | | |
| 1732 | 6mer-1- | KKSQLR | 121 |
| | 532 | | |
| 1733 | 6mer-1- | RKWFSR | 145 |
| | 533 | | |
| 1734 | 6mer-1- | KKRLCR | 126 |
| | 534 | | |
| 1735 | 6mer-1- | RRVILK | 139 |
| | 535 | | |
| 1736 | 6mer-1- | RRWFRK | 151 |
| | 536 | | |
| 1737 | 6mer-1- | RRGLCK | 154 |
| | 537 | | |
| 1738 | 6mer-1- | RRSQCK | 142 |
| | 538 | | |
| 1739 | 6mer-1- | KRGIRK | 148 |
| | 539 | | |
| 1740 | 6mer-1- | KRVQTR | 128 |
| | 540 | | |
| 1741 | 6mer-1- | RKWFTR | 136 |
| | 541 | | |
| 1742 | 6mer-1- | KRWFRR | 128 |
| | 542 | | |
| 1743 | 6mer-1- | RRSVCK | 145 |
| | 543 | | |
| 1744 | 6mer-1- | KRVICR | 149 |
| | 544 | | |
| 1745 | 6mer-1- | RRSYRK | 127 |
| | 545 | | |
| 1746 | 6mer-1- | RKLVQR | 123 |
| | 546 | | |
| 1747 | 6mer-1- | RKVQQR | 148 |
| | 547 | | |
| 1748 | 6mer-1- | RRVYSR | 123 |
| | 548 | | |
| 1749 | 6mer-1- | KKSYQR | 142 |
| | 549 | | |
| 1750 | 6mer-1- | RRLICR | 148 |
| | 550 | | |
| 1751 | 6mer-1- | KRGRLR | 142 |
| | 551 | | |
| 1752 | 6mer-1- | RKRYRK | 144 |
| | 552 | | |
| 1753 | 6mer-1- | RRGVRK | 128 |
| | 553 | | |
| 1754 | 6mer-1- | KRSVTR | 131 |
| | 554 | | |
| 1755 | 6mer-1- | KKWYLK | 128 |
| | 555 | | |
| 1756 | 6mer-1- | KKGFTK | 145 |
| | 556 | | |
| 1757 | 6mer-1- | KRQVQK | 128 |
| | 557 | | |
| 1758 | 6mer-1- | RRLIQR | 139 |
| | 558 | | |
| 1759 | 6mer-1- | RRRLTK | 139 |
| | 559 | | |
| 1760 | 6mer-1- | RRSFSK | 127 |
| | 560 | | |
| 1761 | 6mer-1- | RKVYLK | 131 |
| | 561 | | |
| 1762 | 6mer-1- | KRSYQR | 148 |
| | 562 | | |
| 1763 | 6mer-1- | RRSFTR | 139 |
| | 563 | | |
| 1764 | 6mer-1- | KRSITK | 139 |
| | 564 | | |
| 1765 | 6mer-1- | KRSIRR | 151 |
| | 565 | | |
| 1766 | 6mer-1- | KKSFCR | 148 |
| | 566 | | |
| 1767 | 6mer-1- | KKRVSR | 136 |
| | 567 | | |
| 1768 | 6mer-1- | KRWQQK | 147 |
| | 568 | | |
| 1769 | 6mer-1- | RRVITK | 148 |
| | 569 | | |
| 1770 | 6mer-1- | RKRLRK | 122 |
| | 570 | | |
| 1771 | 6mer-1- | RKLLCK | 154 |
| | 571 | | |
| 1772 | 6mer-1- | KRVLLK | 126 |
| | 572 | | |
| 1773 | 6mer-1- | KRVLLR | 126 |
| | 573 | | |
| 1774 | 6mer-1- | RKSYLR | 148 |
| | 574 | | |
| 1775 | 6mer-1- | KRWVRR | 148 |
| | 575 | | |
| 1776 | 6mer-1- | RKRQRR | 153 |
| | 576 | | |
| 1777 | 6mer-1- | KKQYQR | 128 |
| | 577 | | |
| 1778 | 6mer-1- | RKGQYK | 139 |
| | 578 | | |
| 1779 | 6mer-1- | KRSVRK | 148 |
| | 579 | | |
| 1780 | 6mer-1- | KKSLQK | 121 |
| | 580 | | |
| 1781 | 6mer-1- | KRGLYK | 139 |
| | 581 | | |
| 1782 | 6mer-1- | KRWFLK | 137 |
| | 582 | | |
| 1783 | 6mer-1- | KKVLYK | 139 |
| | 583 | | |
| 1784 | 6mer-1- | RRQVSK | 127 |
| | 584 | | |
| 1785 | 6mer-1- | RKSRQK | 144 |
| | 585 | | |
| 1786 | 6mer-1- | KRVICK | 136 |
| | 586 | | |
| 1787 | 6mer-1- | KKQLLK | 148 |
| | 587 | | |
| 1788 | 6mer-1- | RRLVRK | 153 |
| | 588 | | |
| 1789 | 6mer-1- | KKLQQK | 139 |
| | 589 | | |
| 1790 | 6mer-1- | RKGVTK | 142 |
| | 590 | | |
| 1791 | 6mer-1- | KKRLYR | 147 |
| | 591 | | |
| 1792 | 6mer-1- | RRWLSK | 135 |
| | 592 | | |
| 1793 | 6mer-1- | RKVYRK | 148 |
| | 593 | | |
| 1794 | 6mer-1- | KRQLQR | 121 |
| | 594 | | |
| 1795 | 6mer-1- | KKSLCK | 121 |
| | 595 | | |
| 1796 | 6mer-1- | RKGVLR | 148 |
| | 596 | | |
| 1797 | 6mer-1- | KRGFYK | 148 |
| | 597 | | |
| 1798 | 6mer-1- | RKWLSK | 142 |
| | 598 | | |
| 1799 | 6mer-1- | KKLYQR | 124 |
| | 599 | | |
| 1800 | 6mer-1- | KRGYCR | 139 |
| | 600 | | |

| | |
|---|---|
| Average Binding affinity | 138.66 |

TABLE 11
6mer-1 Bottom sequence

| SEQ ID | Unique | | Binding |
|---|---|---|---|
| NO: | No. | Sequence | affinity |
| 1801 | 6mer-1- | KKEWNK | 27 |
| | 601 | | |
| 1802 | 6mer-1- | RKAEKR | 18 |
| | 602 | | |
| 1803 | 6mer-1- | KRPHFK | 13 |
| | 603 | | |
| 1804 | 6mer-1- | KKFTKK | 24 |
| | 604 | | |
| 1805 | 6mer-1- | RKNADR | 20 |
| | 605 | | |
| 1806 | 6mer-1- | RREWFR | 15 |
| | 606 | | |
| 1807 | 6mer-1- | KKDHFR | 22 |
| | 607 | | |
| 1808 | 6mer-1- | KKACMR | 18 |
| | 608 | | |
| 1809 | 6mer-1- | RKNPVR | 24 |
| | 609 | | |
| 1810 | 6mer-1- | KKHHER | 27 |
| | 610 | | |
| 1811 | 6mer-1- | KKNCHK | 23 |
| | 611 | | |
| 1812 | 6mer-1- | KRIMER | 17 |
| | 612 | | |
| 1813 | 6mer-1- | KRIMKK | 14 |
| | 613 | | |
| 1814 | 6mer-1- | KKEEER | 12 |
| | 614 | | |
| 1815 | 6mer-1- | KKTSER | 18 |
| | 615 | | |
| 1816 | 6mer-1- | KKNTIK | 31 |
| | 616 | | |
| 1817 | 6mer-1- | KRHNVR | 31 |
| | 617 | | |
| 1818 | 6mer-1- | RKCHVK | 19 |
| | 618 | | |
| 1819 | 6mer-1- | KKIDKR | 23 |
| | 619 | | |
| 1820 | 6mer-1- | RRKTAK | 11 |
| | 620 | | |
| 1821 | 6mer-1- | RRMAGK | 30 |
| | 621 | | |
| 1822 | 6mer-1- | KKCPNR | 18 |
| | 622 | | |
| 1823 | 6mer-1- | RRTDWR | 21 |
| | 623 | | |
| 1824 | 6mer-1- | KKPPAK | 30 |
| | 624 | | |
| 1825 | 6mer-1- | KREDKK | 33 |
| | 625 | | |
| 1826 | 6mer-1- | KRPDNR | 27 |
| | 626 | | |
| 1827 | 6mer-1- | RRTWWR | 29 |
| | 627 | | |
| 1828 | 6mer-1- | RRENEK | 23 |
| | 628 | | |
| 1829 | 6mer-1- | RKMDAK | 11 |
| | 629 | | |
| 1830 | 6mer-1- | KRMEPR | 14 |
| | 630 | | |
| 1831 | 6mer-1- | RRYSDR | 13 |
| | 631 | | |
| 1832 | 6mer-1- | RKDTAR | 17 |
| | 632 | | |
| 1833 | 6mer-1- | RKIDAK | 16 |
| | 633 | | |
| 1834 | 6mer-1- | KKNTMR | 12 |
| | 634 | | |
| 1835 | 6mer-1- | KKTTWK | 33 |
| | 635 | | |
| 1836 | 6mer-1- | RKYKDR | 27 |
| | 636 | | |
| 1837 | 6mer-1- | RRFEFK | 33 |
| | 637 | | |
| 1838 | 6mer-1- | KKESHR | 20 |
| | 638 | | |
| 1839 | 6mer-1- | KRPNVR | 24 |
| | 639 | | |
| 1840 | 6mer-1- | RRNCWR | 25 |
| | 640 | | |
| 1841 | 6mer-1- | RREMFK | 21 |
| | 641 | | |
| 1842 | 6mer-1- | KKYNGK | 24 |
| | 642 | | |
| 1843 | 6mer-1- | KRYSMR | 31 |
| | 643 | | |
| 1844 | 6mer-1- | RKTWFR | 31 |
| | 644 | | |
| 1845 | 6mer-1- | RRTTIR | 33 |
| | 645 | | |
| 1846 | 6mer-1- | RRCTGK | 33 |
| | 646 | | |
| 1847 | 6mer-1- | RKYNVR | 14 |
| | 647 | | |
| 1848 | 6mer-1- | KKFWEK | 17 |
| | 648 | | |
| 1849 | 6mer-1- | RRIAGK | 32 |
| | 649 | | |
| 1850 | 6mer-1- | RRCNNR | 18 |
| | 650 | | |
| 1851 | 6mer-1- | KRICWK | 27 |
| | 651 | | |
| 1852 | 6mer-1- | RRPEVK | 26 |
| | 652 | | |
| 1853 | 6mer-1- | KRMTHR | 15 |
| | 653 | | |
| 1854 | 6mer-1- | KRMNDR | 23 |
| | 654 | | |
| 1855 | 6mer-1- | RKNMFR | 12 |
| | 655 | | |
| 1856 | 6mer-1- | RRPTHK | 28 |
| | 656 | | |
| 1857 | 6mer-1- | RRCTVR | 17 |
| | 657 | | |
| 1858 | 6mer-1- | RKKEMK | 20 |
| | 658 | | |
| 1859 | 6mer-1- | KKPSKR | 29 |
| | 659 | | |
| 1860 | 6mer-1- | KKYHVK | 31 |
| | 660 | | |
| 1861 | 6mer-1- | RKPKWR | 14 |
| | 661 | | |
| 1862 | 6mer-1- | KKMTER | 20 |
| | 662 | | |
| 1863 | 6mer-1- | KKFKDR | 26 |
| | 663 | | |
| 1864 | 6mer-1- | KRDHIK | 26 |
| | 664 | | |
| 1865 | 6mer-1- | KKCDGK | 21 |
| | 665 | | |
| 1866 | 6mer-1- | KKAANK | 18 |
| | 666 | | |
| 1867 | 6mer-1- | KRDSPK | 32 |
| | 667 | | |
| 1868 | 6mer-1- | RKATVK | 17 |
| | 668 | | |
| 1869 | 6mer-1- | KRNMAK | 23 |
| | 669 | | |
| 1870 | 6mer-1- | KKDWNR | 11 |
| | 670 | | |
| 1871 | 6mer-1- | KKNMVR | 11 |
| | 671 | | |
| 1872 | 6mer-1- | RKMEIR | 17 |
| | 672 | | |
| 1873 | 6mer-1- | RRAMPK | 16 |
| | 673 | | |
| 1874 | 6mer-1- | RKHPKK | 32 |
| | 674 | | |
| 1875 | 6mer-1- | KKIWKR | 21 |
| | 675 | | |
| 1876 | 6mer-1- | KRCPWR | 16 |
| | 676 | | |
| 1877 | 6mer-1- | KKCCFR | 22 |
| | 677 | | |
| 1878 | 6mer-1- | KRMAAK | 25 |
| | 678 | | |
| 1879 | 6mer-1- | KKAEER | 30 |
| | 679 | | |
| 1880 | 6mer-1- | KKDPPR | 27 |
| | 680 | | |
| 1881 | 6mer-1- | KKEWKK | 32 |
| | 681 | | |
| 1882 | 6mer-1- | KKKDIR | 30 |
| | 682 | | |
| 1883 | 6mer-1- | KRDSMR | 16 |
| | 683 | | |
| 1884 | 6mer-1- | KRNNDR | 20 |
| | 684 | | |
| 1885 | 6mer-1- | RRESWK | 14 |
| | 685 | | |
| 1886 | 6mer-1- | KKYEVR | 25 |
| | 686 | | |
| 1887 | 6mer-1- | RREWIK | 23 |
| | 687 | | |
| 1888 | 6mer-1- | RKDEVR | 33 |
| | 688 | | |
| 1889 | 6mer-1- | KRCPVR | 11 |
| | 689 | | |
| 1890 | 6mer-1- | KREAER | 21 |
| | 690 | | |
| 1891 | 6mer-1- | RKPKAR | 31 |
| | 691 | | |
| 1892 | 6mer-1- | RKNTHK | 22 |
| | 692 | | |
| 1893 | 6mer-1- | RKIDMK | 22 |
| | 693 | | |
| 1894 | 6mer-1- | RKYTKR | 27 |
| | 694 | | |
| 1895 | 6mer-1- | KRADVK | 13 |
| | 695 | | |
| 1896 | 6mer-1- | KKHCNR | 18 |
| | 696 | | |
| 1897 | 6mer-1- | RRPTNR | 13 |
| | 697 | | |
| 1898 | 6mer-1- | KRFNHK | 27 |
| | 698 | | |
| 1899 | 6mer-1- | RRTTVR | 28 |
| | 699 | | |
| 1900 | 6mer-1- | RKKMWK | 19 |
| | 700 | | |
| 1901 | 6mer-1- | RRKTWR | 13 |
| | 701 | | |
| 1902 | 6mer-1- | KRDWVK | 31 |
| | 702 | | |
| 1903 | 6mer-1- | KKFHPR | 18 |
| | 703 | | |
| 1904 | 6mer-1- | RRMCER | 16 |
| | 704 | | |
| 1905 | 6mer-1- | KRTEWR | 12 |
| | 705 | | |
| 1906 | 6mer-1- | KRMKDR | 29 |
| | 706 | | |
| 1907 | 6mer-1- | KRFWPK | 26 |
| | 707 | | |
| 1908 | 6mer-1- | KKKHEK | 14 |
| | 708 | | |
| 1909 | 6mer-1- | KKFKPK | 29 |
| | 709 | | |
| 1910 | 6mer-1- | KKMHHR | 21 |
| | 710 | | |
| 1911 | 6mer-1- | RRATHR | 19 |
| | 711 | | |
| 1912 | 6mer-1- | KKPSNK | 24 |
| | 712 | | |
| 1913 | 6mer-1- | KKATNK | 20 |
| | 713 | | |
| 1914 | 6mer-1- | KRTSFK | 25 |
| | 714 | | |
| 1915 | 6mer-1- | KRMMVK | 18 |
| | 715 | | |
| 1916 | 6mer-1- | RRMPFK | 11 |
| | 716 | | |
| 1917 | 6mer-1- | KRHEDR | 22 |
| | 717 | | |
| 1918 | 6mer-1- | RKFKAR | 23 |
| | 718 | | |
| 1919 | 6mer-1- | KKDAEK | 27 |
| | 719 | | |
| 1920 | 6mer-1- | RRKHKR | 11 |
| | 720 | | |
| 1921 | 6mer-1- | RKAMEK | 22 |
| | 721 | | |
| 1922 | 6mer-1- | RRNKVR | 12 |
| | 722 | | |
| 1923 | 6mer-1- | RKMPAK | 33 |
| | 723 | | |
| 1924 | 6mer-1- | KRPKNK | 19 |
| | 724 | | |
| 1925 | 6mer-1- | KKDKPK | 32 |
| | 725 | | |
| 1926 | 6mer-1- | KKHSMK | 33 |
| | 726 | | |
| 1927 | 6mer-1- | RKANGK | 29 |
| | 727 | | |
| 1928 | 6mer-1- | RRDNAR | 23 |
| | 728 | | |
| 1929 | 6mer-1- | KKKSGK | 23 |
| | 729 | | |
| 1930 | 6mer-1- | KRATFR | 13 |
| | 730 | | |
| 1931 | 6mer-1- | RRIKAR | 18 |
| | 731 | | |
| 1932 | 6mer-1- | RRAAVR | 26 |
| | 732 | | |
| 1933 | 6mer-1- | KKKMFK | 21 |
| | 733 | | |
| 1934 | 6mer-1- | RRTHER | 21 |
| | 734 | | |
| 1935 | 6mer-1- | RKDKER | 19 |
| | 735 | | |
| 1936 | 6mer-1- | KKATDK | 15 |
| | 736 | | |
| 1937 | 6mer-1- | RRKNAR | 27 |
| | 737 | | |
| 1938 | 6mer-1- | RKYHHR | 25 |
| | 738 | | |
| 1939 | 6mer-1- | RKCCEK | 32 |
| | 739 | | |
| 1940 | 6mer-1- | RKDNKR | 26 |
| | 740 | | |
| 1941 | 6mer-1- | RKEAGR | 24 |
| | 741 | | |
| 1942 | 6mer-1- | RRFHWR | 14 |
| | 742 | | |
| 1943 | 6mer-1- | KKTMVR | 14 |
| | 743 | | |
| 1944 | 6mer-1- | RKHEIK | 31 |
| | 744 | | |
| 1945 | 6mer-1- | KKTMEK | 11 |
| | 745 | | |
| 1946 | 6mer-1- | RKMSVK | 24 |
| | 746 | | |
| 1947 | 6mer-1- | KKTMDR | 24 |
| | 747 | | |
| 1948 | 6mer-1- | RKHNGR | 24 |
| | 748 | | |
| 1949 | 6mer-1- | RKPHWR | 33 |
| | 749 | | |
| 1950 | 6mer-1- | KRENIK | 33 |
| | 750 | | |
| 1951 | 6mer-1- | RRTNFK | 27 |
| | 751 | | |
| 1952 | 6mer-1- | KRPTEK | 16 |
| | 752 | | |
| 1953 | 6mer-1- | KKDTHK | 12 |
| | 753 | | |
| 1954 | 6mer-1- | RKKKMK | 24 |
| | 754 | | |
| 1955 | 6mer-1- | RRANMR | 25 |
| | 755 | | |
| 1956 | 6mer-1- | RKAKMK | 33 |
| | 756 | | |
| 1957 | 6mer-1- | RKDNEK | 26 |
| | 757 | | |
| 1958 | 6mer-1- | KKYHHR | 33 |
| | 758 | | |
| 1959 | 6mer-1- | RKMTWR | 23 |
| | 759 | | |
| 1960 | 6mer-1- | KRMMVR | 21 |
| | 760 | | |
| 1961 | 6mer-1- | RKETFR | 33 |
| | 761 | | |
| 1962 | 6mer-1- | KKTKAR | 13 |
| | 762 | | |
| 1963 | 6mer-1- | RRDCAK | 12 |
| | 763 | | |
| 1964 | 6mer-1- | RRNPFK | 24 |
| | 764 | | |
| 1965 | 6mer-1- | KRASPK | 25 |
| | 765 | | |
| 1966 | 6mer-1- | RKCTIR | 15 |
| | 766 | | |
| 1967 | 6mer-1- | KRTPDK | 18 |
| | 767 | | |
| 1968 | 6mer-1- | RKFEWK | 32 |
| | 768 | | |
| 1969 | 6mer-1- | RKMPVK | 14 |
| | 769 | | |
| 1970 | 6mer-1- | RKTNAR | 29 |
| | 770 | | |
| 1971 | 6mer-1- | KKMDIK | 17 |
| | 771 | | |
| 1972 | 6mer-1- | KRNCAK | 12 |
| | 772 | | |
| 1973 | 6mer-1- | KRTEIR | 29 |
| | 773 | | |
| 1974 | 6mer-1- | KKEMER | 21 |
| | 774 | | |
| 1975 | 6mer-1- | KKYPWR | 12 |
| | 775 | | |
| 1976 | 6mer-1- | KKTSIK | 13 |
| | 776 | | |
| 1977 | 6mer-1- | RRHNHR | 16 |
| | 777 | | |
| 1978 | 6mer-1- | RRDDFR | 28 |
| | 778 | | |
| 1979 | 6mer-1- | RRPDAR | 30 |
| | 779 | | |
| 1980 | 6mer-1- | KRKCWR | 24 |
| | 780 | | |
| 1981 | 6mer-1- | RRHWDK | 16 |
| | 781 | | |
| 1982 | 6mer-1- | KKNAWK | 30 |
| | 782 | | |
| 1983 | 6mer-1- | KKNEFK | 29 |
| | 783 | | |
| 1984 | 6mer-1- | KKFTPK | 33 |
| | 784 | | |
| 1985 | 6mer-1- | KKTCER | 19 |
| | 785 | | |
| 1986 | 6mer-1- | KRIKEK | 26 |
| | 786 | | |
| 1987 | 6mer-1- | KKESIK | 16 |
| | 787 | | |
| 1988 | 6mer-1- | RKIPKK | 22 |
| | 788 | | |
| 1989 | 6mer-1- | KRMMPK | 19 |
| | 789 | | |
| 1990 | 6mer-1- | KKPNPK | 12 |
| | 790 | | |
| 1991 | 6mer-1- | RKPDDK | 13 |
| | 791 | | |
| 1992 | 6mer-1- | KRKDKK | 30 |
| | 792 | | |
| 1993 | 6mer-1- | KKTPNR | 31 |
| | 793 | | |
| 1994 | 6mer-1- | RKYEPK | 11 |
| | 794 | | |
| 1995 | 6mer-1- | KKCHMR | 12 |
| | 795 | | |
| 1996 | 6mer-1- | RRHAFK | 28 |
| | 796 | | |
| 1997 | 6mer-1- | RRAWNK | 22 |
| | 797 | | |
| 1998 | 6mer-1- | RRDCFR | 18 |
| | 798 | | |
| 1999 | 6mer-1- | RRKKKR | 30 |
| | 799 | | |
| 2000 | 6mer-1- | RREHIR | 15 |
| | 800 | | |
| 2001 | 6mer-1- | KKCAVK | 18 |
| | 801 | | |
| 2002 | 6mer-1- | RKYHGR | 32 |
| | 802 | | |
| 2003 | 6mer-1- | RKMKHK | 31 |
| | 803 | | |
| 2004 | 6mer-1- | KRDPFR | 31 |
| | 804 | | |
| 2005 | 6mer-1- | KRDTMK | 24 |
| | 805 | | |
| 2006 | 6mer-1- | RKKTIR | 12 |
| | 806 | | |
| 2007 | 6mer-1- | RRDKNR | 13 |
| | 807 | | |
| 2008 | 6mer-1- | RRFEKK | 24 |
| | 808 | | |
| 2009 | 6mer-1- | KKKSNR | 12 |
| | 809 | | |
| 2010 | 6mer-1- | RKCNAR | 12 |
| | 810 | | |
| 2011 | 6mer-1- | KRHCHK | 16 |
| | 811 | | |
| 2012 | 6mer-1- | RKDHMK | 26 |
| | 812 | | |
| 2013 | 6mer-1- | RREDFK | 15 |
| | 813 | | |
| 2014 | 6mer-1- | KKCNAK | 15 |
| | 814 | | |
| 2015 | 6mer-1- | RRFEMR | 23 |
| | 815 | | |
| 2016 | 6mer-1- | RKIDFK | 14 |
| | 816 | | |
| 2017 | 6mer-1- | RRIMKR | 16 |
| | 817 | | |
| 2018 | 6mer-1- | RKIKAR | 14 |
| | 818 | | |
| 2019 | 6mer-1- | KRMHAK | 17 |
| | 819 | | |
| 2020 | 6mer-1- | KRNDGK | 12 |
| | 820 | | |
| 2021 | 6mer-1- | RRTTNR | 22 |
| | 821 | | |
| 2022 | 6mer-1- | KREPIK | 17 |
| | 822 | | |
| 2023 | 6mer-1- | KRHTGK | 12 |
| | 823 | | |
| 2024 | 6mer-1- | KKMNIK | 12 |
| | 824 | | |
| 2025 | 6mer-1- | RKEKWK | 30 |
| | 825 | | |
| 2026 | 6mer-1- | KKAHMR | 31 |
| | 826 | | |
| 2027 | 6mer-1- | RKKKFR | 30 |
| | 827 | | |
| 2028 | 6mer-1- | RRPNMK | 26 |
| | 828 | | |
| 2029 | 6mer-1- | RRIHKK | 25 |
| | 829 | | |
| 2030 | 6mer-1- | KKTTMK | 33 |
| | 830 | | |
| 2031 | 6mer-1- | KKNPWK | 15 |
| | 831 | | |
| 2032 | 6mer-1- | RKYWGK | 12 |
| | 832 | | |
| 2033 | 6mer-1- | RRYKNR | 19 |
| | 833 | | |
| 2034 | 6mer-1- | KRNTIR | 17 |
| | 834 | | |
| 2035 | 6mer-1- | KRTADK | 26 |
| | 835 | | |
| 2036 | 6mer-1- | RRCMIK | 22 |
| | 836 | | |
| 2037 | 6mer-1- | KRDHAK | 19 |
| | 837 | | |
| 2038 | 6mer-1- | KRNTWK | 17 |
| | 838 | | |
| 2039 | 6mer-1- | KRNWAK | 29 |
| | 839 | | |
| 2040 | 6mer-1- | RKICNK | 12 |
| | 840 | | |
| 2041 | 6mer-1- | KKDAPR | 30 |
| | 841 | | |
| 2042 | 6mer-1- | RRFANK | 11 |
| | 842 | | |
| 2043 | 6mer-1- | KKKTIK | 28 |
| | 843 | | |
| 2044 | 6mer-1- | KKPMNR | 28 |
| | 844 | | |
| 2045 | 6mer-1- | KKIDKK | 23 |
| | 845 | | |
| 2046 | 6mer-1- | RKDAEK | 28 |
| | 846 | | |
| 2047 | 6mer-1- | KKYNHK | 20 |
| | 847 | | |
| 2048 | 6mer-1- | RKTMFK | 19 |
| | 848 | | |
| 2049 | 6mer-1- | KKFNWK | 21 |
| | 849 | | |
| 2050 | 6mer-1- | RRNPEK | 29 |
| | 850 | | |
| 2051 | 6mer-1- | RRYMEK | 30 |
| | 851 | | |
| 2052 | 6mer-1- | KRASVK | 19 |
| | 852 | | |
| 2053 | 6mer-1- | KRCNGR | 30 |
| | 853 | | |
| 2054 | 6mer-1- | KKEAVR | 16 |
| | 854 | | |
| 2055 | 6mer-1- | RKCDVR | 15 |
| | 855 | | |
| 2056 | 6mer-1- | KRMWFK | 30 |
| | 856 | | |
| 2057 | 6mer-1- | KRPAFK | 14 |
| | 857 | | |
| 2058 | 6mer-1- | KKKHKR | 27 |
| | 858 | | |
| 2059 | 6mer-1- | RKCMVK | 27 |
| | 859 | | |
| 2060 | 6mer-1- | RKHWWR | 22 |
| | 860 | | |
| 2061 | 6mer-1- | KRINIR | 21 |
| | 861 | | |
| 2062 | 6mer-1- | KKHSEK | 32 |
| | 862 | | |
| 2063 | 6mer-1- | RRCTER | 27 |
| | 863 | | |
| 2064 | 6mer-1- | RRTWGR | 32 |
| | 864 | | |
| 2065 | 6mer-1- | KKMTAR | 21 |
| | 865 | | |
| 2066 | 6mer-1- | KRCHFR | 26 |
| | 866 | | |
| 2067 | 6mer-1- | KRIPMR | 25 |
| | 867 | | |
| 2068 | 6mer-1- | KKHHAR | 14 |
| | 868 | | |
| 2069 | 6mer-1- | KRKDER | 22 |
| | 869 | | |
| 2070 | 6mer-1- | KRMSHR | 25 |
| | 870 | | |
| 2071 | 6mer-1- | KREWDR | 30 |
| | 871 | | |
| 2072 | 6mer-1- | KRPCHR | 23 |
| | 872 | | |
| 2073 | 6mer-1- | KRIWAR | 23 |
| | 873 | | |
| 2074 | 6mer-1- | KRANHK | 18 |
| | 874 | | |
| 2075 | 6mer-1- | KKTNGR | 33 |
| | 875 | | |
| 2076 | 6mer-1- | RKYWAR | 19 |
| | 876 | | |
| 2077 | 6mer-1- | KKPEWR | 19 |
| | 877 | | |
| 2078 | 6mer-1- | RRKDNR | 27 |
| | 878 | | |
| 2079 | 6mer-1- | RRYNNR | 27 |
| | 879 | | |
| 2080 | 6mer-1- | KRPMDK | 21 |
| | 880 | | |
| 2081 | 6mer-1- | KKHMER | 20 |
| | 881 | | |
| 2082 | 6mer-1- | KKPAMR | 25 |
| | 882 | | |
| 2083 | 6mer-1- | KKIDDK | 21 |
| | 883 | | |
| 2084 | 6mer-1- | KRYTKR | 26 |
| | 884 | | |
| 2085 | 6mer-1- | RRKTPR | 17 |
| | 885 | | |
| 2086 | 6mer-1- | RKFSNK | 17 |
| | 886 | | |
| 2087 | 6mer-1- | KRINHR | 30 |
| | 887 | | |
| 2088 | 6mer-1- | KKTANK | 33 |
| | 888 | | |
| 2089 | 6mer-1- | KRIMEK | 25 |
| | 889 | | |
| 2090 | 6mer-1- | RRTSNK | 18 |
| | 890 | | |
| 2091 | 6mer-1- | RKMAFR | 13 |
| | 891 | | |
| 2092 | 6mer-1- | RKTEKR | 20 |
| | 892 | | |
| 2093 | 6mer-1- | RRIPHR | 22 |
| | 893 | | |
| 2094 | 6mer-1- | RKCWWR | 18 |
| | 894 | | |
| 2095 | 6mer-1- | KKDSKK | 28 |
| | 895 | | |
| 2096 | 6mer-1- | KRDWIK | 11 |
| | 896 | | |
| 2097 | 6mer-1- | RRPSIK | 24 |
| | 897 | | |
| 2098 | 6mer-1- | RKATKR | 31 |
| | 898 | | |
| 2099 | 6mer-1- | KRMKWK | 31 |
| | 899 | | |
| 2100 | 6mer-1- | RRDTGR | 24 |
| | 900 | | |
| 2101 | 6mer-1- | RKPNGR | 35 |
| | 901 | | |
| 2102 | 6mer-1- | RRDKMK | 39 |
| | 902 | | |
| 2103 | 6mer-1- | KKHKPR | 37 |
| | 903 | | |
| 2104 | 6mer-1- | KKDTKR | 31 |
| | 904 | | |
| 2105 | 6mer-1- | RRICER | 36 |
| | 905 | | |
| 2106 | 6mer-1- | KKINGK | 30 |
| | 906 | | |
| 2107 | 6mer-1- | RKPAWR | 42 |
| | 907 | | |
| 2108 | 6mer-1- | KKFMVR | 37 |
| | 908 | | |
| 2109 | 6mer-1- | RKFCMR | 33 |
| | 909 | | |
| 2110 | 6mer-1- | KRPTIR | 42 |
| | 910 | | |
| 2111 | 6mer-1- | KRCAAR | 28 |
| | 911 | | |
| 2112 | 6mer-1- | KKETFR | 33 |
| | 912 | | |
| 2113 | 6mer-1- | KRFWWK | 27 |
| | 913 | | |
| 2114 | 6mer-1- | RRKCVR | 39 |
| | 914 | | |
| 2115 | 6mer-1- | RKDTWK | 27 |
| | 915 | | |
| 2116 | 6mer-1- | RRNAAK | 33 |
| | 916 | | |
| 2117 | 6mer-1- | KRADDK | 27 |
| | 917 | | |
| 2118 | 6mer-1- | RRESMR | 33 |
| | 918 | | |
| 2119 | 6mer-1- | RKDHIK | 26 |
| | 919 | | |
| 2120 | 6mer-1- | RRPAMR | 40 |
| | 920 | | |
| 2121 | 6mer-1- | RKFWHR | 36 |
| | 921 | | |
| 2122 | 6mer-1- | RRDWGR | 34 |
| | 922 | | |
| 2123 | 6mer-1- | RRASDR | 43 |
| | 923 | | |
| 2124 | 6mer-1- | RKFNWR | 29 |
| | 924 | | |
| 2125 | 6mer-1- | KKAMHR | 42 |
| | 925 | | |
| 2126 | 6mer-1- | KRESDR | 40 |
| | 926 | | |
| 2127 | 6mer-1- | KRESHR | 37 |
| | 927 | | |
| 2128 | 6mer-1- | KRYCPK | 30 |
| | 928 | | |
| 2129 | 6mer-1- | RRCDHK | 25 |
| | 929 | | |
| 2130 | 6mer-1- | KKESNK | 43 |
| | 930 | | |
| 2131 | 6mer-1- | KKNWPR | 35 |
| | 931 | | |
| 2132 | 6mer-1- | KRFEFK | 38 |
| | 932 | | |
| 2133 | 6mer-1- | RRPWNR | 28 |
| | 933 | | |
| 2134 | 6mer-1- | KRPPGK | 39 |
| | 934 | | |
| 2135 | 6mer-1- | RKKDIK | 40 |
| | 935 | | |
| 2136 | 6mer-1- | RKETDR | 36 |
| | 936 | | |
| 2137 | 6mer-1- | RKPTNR | 34 |
| | 937 | | |
| 2138 | 6mer-1- | KKIAWK | 28 |
| | 938 | | |
| 2139 | 6mer-1- | KRNDFK | 41 |
| | 939 | | |
| 2140 | 6mer-1- | RKPEDR | 29 |
| | 940 | | |
| 2141 | 6mer-1- | RKTPKK | 29 |
| | 941 | | |
| 2142 | 6mer-1- | RRMMVR | 37 |
| | 942 | | |
| 2143 | 6mer-1- | KKEHDK | 43 |
| | 943 | | |
| 2144 | 6mer-1- | RKPAGK | 25 |
| | 944 | | |
| 2145 | 6mer-1- | RKTSIK | 31 |
| | 945 | | |
| 2146 | 6mer-1- | RRCEPR | 31 |
| | 946 | | |
| 2147 | 6mer-1- | KRTKGR | 31 |
| | 947 | | |
| 2148 | 6mer-1- | RKFTVR | 24 |
| | 948 | | |
| 2149 | 6mer-1- | RKEMPR | 37 |
| | 949 | | |
| 2150 | 6mer-1- | RKEDKR | 29 |
| | 950 | | |
| 2151 | 6mer-1- | RKAMDK | 29 |
| | 951 | | |
| 2152 | 6mer-1- | KRHDKK | 28 |
| | 952 | | |
| 2153 | 6mer-1- | KRTNGK | 26 |
| | 953 | | |
| 2154 | 6mer-1- | KKAKGR | 41 |
| | 954 | | |
| 2155 | 6mer-1- | RKECFK | 23 |
| | 955 | | |
| 2156 | 6mer-1- | KRKSNK | 34 |
| | 956 | | |
| 2157 | 6mer-1- | KKPPDK | 43 |
| | 957 | | |
| 2158 | 6mer-1- | KRYAGR | 43 |
| | 958 | | |
| 2159 | 6mer-1- | KKIWFR | 36 |
| | 959 | | |
| 2160 | 6mer-1- | KKCPFR | 34 |
| | 960 | | |
| 2161 | 6mer-1- | RRTWAR | 122 |
| | 961 | | |
| 2162 | 6mer-1- | KKNCDK | 42 |
| | 962 | | |
| 2163 | 6mer-1- | RREEDK | 29 |
| | 963 | | |
| 2164 | 6mer-1- | RKFKNK | 42 |
| | 964 | | |
| 2165 | 6mer-1- | KRIWDK | 36 |
| | 965 | | |
| 2166 | 6mer-1- | RRNSWK | 22 |
| | 966 | | |
| 2167 | 6mer-1- | RRTEDR | 24 |
| | 967 | | |
| 2168 | 6mer-1- | RREDFR | 39 |
| | 968 | | |
| 2169 | 6mer-1- | RKDHWR | 33 |
| | 969 | | |
| 2170 | 6mer-1- | RRCCAR | 38 |
| | 970 | | |
| 2171 | 6mer-1- | RKIEMK | 32 |
| | 971 | | |
| 2172 | 6mer-1- | RRHTHK | 43 |
| | 972 | | |
| 2173 | 6mer-1- | RRDHVK | 25 |
| | 973 | | |
| 2174 | 6mer-1- | RKPAHK | 27 |
| | 974 | | |
| 2175 | 6mer-1- | RKASIK | 22 |
| | 975 | | |
| 2176 | 6mer-1- | RKEMIK | 40 |
| | 976 | | |
| 2177 | 6mer-1- | RRPCFR | 43 |
| | 977 | | |
| 2178 | 6mer-1- | RRKSHK | 43 |
| | 978 | | |
| 2179 | 6mer-1- | RRYWEK | 42 |
| | 979 | | |
| 2180 | 6mer-1- | RKICAK | 33 |
| | 980 | | |
| 2181 | 6mer-1- | RKDDKK | 27 |
| | 981 | | |
| 2182 | 6mer-1- | KRCPDR | 35 |
| | 982 | | |
| 2183 | 6mer-1- | KRPHKK | 38 |
| | 983 | | |
| 2184 | 6mer-1- | KKESDK | 33 |
| | 984 | | |
| 2185 | 6mer-1- | KRKSER | 22 |
| | 985 | | |
| 2186 | 6mer-1- | KKAEEK | 22 |
| | 986 | | |
| 2187 | 6mer-1- | RRTEFK | 34 |
| | 987 | | |
| 2188 | 6mer-1- | KRYPDR | 24 |
| | 988 | | |
| 2189 | 6mer-1- | KRATVR | 27 |
| | 989 | | |
| 2190 | 6mer-1- | RRFTER | 40 |
| | 990 | | |
| 2191 | 6mer-1- | RKAHDK | 25 |
| | 991 | | |
| 2192 | 6mer-1- | RRCTAK | 28 |
| | 992 | | |
| 2193 | 6mer-1- | KRAHDK | 26 |
| | 993 | | |
| 2194 | 6mer-1- | KKHEFR | 37 |
| | 994 | | |
| 2195 | 6mer-1- | KRCHHR | 33 |
| | 995 | | |
| 2196 | 6mer-1- | RRPPWK | 39 |
| | 996 | | |
| 2197 | 6mer-1- | KKPTFR | 35 |
| | 997 | | |
| 2198 | 6mer-1- | KRNPVK | 41 |
| | 998 | | |
| 2199 | 6mer-1- | RKATNR | 24 |
| | 999 | | |
| 2200 | 6mer-1- | RKMSHR | 28 |
| | 1000 | | |
| 2201 | 6mer-1- | RRMPER | 23 |
| | 1001 | | |
| 2202 | 6mer-1- | KRIHMK | 29 |
| | 1002 | | |
| 2203 | 6mer-1- | RKYCHR | 24 |
| | 1003 | | |
| 2204 | 6mer-1- | RKHSHR | 41 |
| | 1004 | | |
| 2205 | 6mer-1- | RKPPDR | 26 |
| | 1005 | | |
| 2206 | 6mer-1- | KKDKIK | 25 |
| | 1006 | | |
| 2207 | 6mer-1- | RKPTDR | 39 |
| | 1007 | | |
| 2208 | 6mer-1- | RKPWAR | 21 |
| | 1008 | | |
| 2209 | 6mer-1- | RKMSKK | 29 |
| | 1009 | | |
| 2210 | 6mer-1- | KKPKHK | 33 |
| | 1010 | | |
| 2211 | 6mer-1- | RKKPEK | 35 |
| | 1011 | | |
| 2212 | 6mer-1- | RRAWVR | 35 |
| | 1012 | | |
| 2213 | 6mer-1- | KKTTNK | 29 |
| | 1013 | | |
| 2214 | 6mer-1- | KKNAWR | 25 |
| | 1014 | | |
| 2215 | 6mer-1- | KREEWR | 26 |
| | 1015 | | |
| 2216 | 6mer-1- | KRHTHR | 21 |
| | 1016 | | |
| 2217 | 6mer-1- | KRANMK | 37 |
| | 1017 | | |
| 2218 | 6mer-1- | KKTAFK | 28 |
| | 1018 | | |
| 2219 | 6mer-1- | KRDAWR | 37 |
| | 1019 | | |
| 2220 | 6mer-1- | KKMEAK | 38 |
| | 1020 | | |
| 2221 | 6mer-1- | KKHDIK | 41 |
| | 1021 | | |
| 2222 | 6mer-1- | RKDTVR | 22 |
| | 1022 | | |
| 2223 | 6mer-1- | KRIMHK | 39 |
| | 1023 | | |
| 2224 | 6mer-1- | RKTEIR | 36 |
| | 1024 | | |
| 2225 | 6mer-1- | KRFAKR | 33 |
| | 1025 | | |
| 2226 | 6mer-1- | RKKCER | 30 |
| | 1026 | | |
| 2227 | 6mer-1- | KKPWHK | 22 |
| | 1027 | | |
| 2228 | 6mer-1- | RRHCWR | 36 |
| | 1028 | | |
| 2229 | 6mer-1- | RRCMAK | 40 |
| | 1029 | | |
| 2230 | 6mer-1- | KKFCFR | 30 |
| | 1030 | | |
| 2231 | 6mer-1- | RKDTHK | 38 |
| | 1031 | | |
| 2232 | 6mer-1- | KKTSMR | 27 |
| | 1032 | | |
| 2233 | 6mer-1- | KRHMVK | 30 |
| | 1033 | | |
| 2234 | 6mer-1- | KKASDR | 24 |
| | 1034 | | |
| 2235 | 6mer-1- | RRCHHR | 34 |
| | 1035 | | |
| 2236 | 6mer-1- | KKITFR | 21 |
| | 1036 | | |
| 2237 | 6mer-1- | RRKNNR | 36 |
| | 1037 | | |
| 2238 | 6mer-1- | RRKKIR | 21 |
| | 1038 | | |
| 2239 | 6mer-1- | KRADIK | 40 |
| | 1039 | | |
| 2240 | 6mer-1- | KRIEFR | 28 |
| | 1040 | | |
| 2241 | 6mer-1- | RKEHGK | 23 |
| | 1041 | | |
| 2242 | 6mer-1- | KKITAR | 40 |
| | 1042 | | |
| 2243 | 6mer-1- | KRAAHR | 30 |
| | 1043 | | |
| 2244 | 6mer-1- | KKHHIR | 24 |
| | 1044 | | |
| 2245 | 6mer-1- | KKTPGR | 27 |
| | 1045 | | |
| 2246 | 6mer-1- | RKDPHR | 38 |
| | 1046 | | |
| 2247 | 6mer-1- | RKATDK | 30 |
| | 1047 | | |
| 2248 | 6mer-1- | RRCMMK | 36 |
| | 1048 | | |
| 2249 | 6mer-1- | KKDHKK | 31 |
| | 1049 | | |
| 2250 | 6mer-1- | KKMEDR | 38 |
| | 1050 | | |
| 2251 | 6mer-1- | KKKSFK | 43 |
| | 1051 | | |
| 2252 | 6mer-1- | KRHWIR | 33 |
| | 1052 | | |
| 2253 | 6mer-1- | RKYTPK | 27 |
| | 1053 | | |
| 2254 | 6mer-1- | RRMKVK | 37 |
| | 1054 | | |
| 2255 | 6mer-1- | KRCNDK | 40 |
| | 1055 | | |
| 2256 | 6mer-1- | RRNTAK | 27 |
| | 1056 | | |
| 2257 | 6mer-1- | KRKPVR | 43 |
| | 1057 | | |
| 2258 | 6mer-1- | KRFPWR | 21 |
| | 1058 | | |
| 2259 | 6mer-1- | RRETVK | 39 |
| | 1059 | | |
| 2260 | 6mer-1- | KRYNVR | 21 |
| | 1060 | | |
| 2261 | 6mer-1- | RRISIR | 41 |
| | 1061 | | |
| 2262 | 6mer-1- | RRICMR | 27 |
| | 1062 | | |
| 2263 | 6mer-1- | KKIDHK | 25 |
| | 1063 | | |
| 2264 | 6mer-1- | RKPTAK | 41 |
| | 1064 | | |
| 2265 | 6mer-1- | KRDKAK | 23 |
| | 1065 | | |
| 2266 | 6mer-1- | RKEDVK | 23 |
| | 1066 | | |
| 2267 | 6mer-1- | RRKHWK | 38 |
| | 1067 | | |
| 2268 | 6mer-1- | KRYHIR | 31 |
| | 1068 | | |
| 2269 | 6mer-1- | KKIWAR | 23 |
| | 1069 | | |
| 2270 | 6mer-1- | KKTCDK | 24 |
| | 1070 | | |
| 2271 | 6mer-1- | RKTKAK | 38 |
| | 1071 | | |
| 2272 | 6mer-1- | KKCTPR | 36 |
| | 1072 | | |
| 2273 | 6mer-1- | RKYMWK | 27 |
| | 1073 | | |
| 2274 | 6mer-1- | KRTCGR | 24 |
| | 1074 | | |
| 2275 | 6mer-1- | KKPSVK | 38 |
| | 1075 | | |
| 2276 | 6mer-1- | RKKEPK | 43 |
| | 1076 | | |
| 2277 | 6mer-1- | RRKWGR | 24 |
| | 1077 | | |
| 2278 | 6mer-1- | RRPDIK | 25 |
| | 1078 | | |
| 2279 | 6mer-1- | RKHPVK | 25 |
| | 1079 | | |
| 2280 | 6mer-1- | KKHNMR | 38 |
| | 1080 | | |
| 2281 | 6mer-1- | KRPSNK | 23 |
| | 1081 | | |
| 2282 | 6mer-1- | KKTCDR | 37 |
| | 1082 | | |
| 2283 | 6mer-1- | KKNAVR | 36 |
| | 1083 | | |
| 2284 | 6mer-1- | KKCCPK | 25 |
| | 1084 | | |
| 2285 | 6mer-1- | KREAMK | 33 |
| | 1085 | | |
| 2286 | 6mer-1- | RKEANK | 22 |
| | 1086 | | |
| 2287 | 6mer-1- | KKPWKR | 27 |
| | 1087 | | |
| 2288 | 6mer-1- | RRETHK | 38 |
| | 1088 | | |
| 2289 | 6mer-1- | RKFTKK | 31 |
| | 1089 | | |
| 2290 | 6mer-1- | KKTMWR | 27 |
| | 1090 | | |
| 2291 | 6mer-1- | KKDDGK | 32 |
| | 1091 | | |
| 2292 | 6mer-1- | RKYHDK | 43 |
| | 1092 | | |
| 2293 | 6mer-1- | RRKSDR | 37 |
| | 1093 | | |
| 2294 | 6mer-1- | RRMAIK | 42 |
| | 1094 | | |
| 2295 | 6mer-1- | RRCHVK | 27 |
| | 1095 | | |
| 2296 | 6mer-1- | RKPEPR | 23 |
| | 1096 | | |
| 2297 | 6mer-1- | RKNCNK | 39 |
| | 1097 | | |
| 2298 | 6mer-1- | RKKDMR | 42 |
| | 1098 | | |
| 2299 | 6mer-1- | RRKTDR | 24 |
| | 1099 | | |
| 2300 | 6mer-1- | KRMSHK | 43 |
| | 1100 | | |
| 2301 | 6mer-1- | RRECDK | 37 |
| | 1101 | | |
| 2302 | 6mer-1- | KRFTKK | 35 |
| | 1102 | | |
| 2303 | 6mer-1- | KREDNK | 27 |
| | 1103 | | |
| 2304 | 6mer-1- | KRNSAR | 28 |
| | 1104 | | |
| 2305 | 6mer-1- | RRCTAR | 40 |
| | 1105 | | |
| 2306 | 6mer-1- | KRFMNK | 39 |
| | 1106 | | |
| 2307 | 6mer-1- | KRCPPR | 36 |
| | 1107 | | |
| 2308 | 6mer-1- | RRAHNK | 43 |
| | 1108 | | |
| 2309 | 6mer-1- | KRCCVR | 41 |
| | 1109 | | |
| 2310 | 6mer-1- | RKFTER | 24 |
| | 1110 | | |
| 2311 | 6mer-1- | RRASPR | 38 |
| | 1111 | | |
| 2312 | 6mer-1- | KKDPWK | 27 |
| | 1112 | | |
| 2313 | 6mer-1- | RRCTMK | 28 |
| | 1113 | | |
| 2314 | 6mer-1- | KKFNFK | 38 |
| | 1114 | | |
| 2315 | 6mer-1- | RKCAFR | 43 |
| | 1115 | | |
| 2316 | 6mer-1- | KRHPFR | 35 |
| | 1116 | | |
| 2317 | 6mer-1- | KKEWFR | 40 |
| | 1117 | | |
| 2318 | 6mer-1- | KKDTIK | 33 |
| | 1118 | | |
| 2319 | 6mer-1- | KRIWVR | 31 |
| | 1119 | | |
| 2320 | 6mer-1- | RRKEAK | 22 |
| | 1120 | | |
| 2321 | 6mer-1- | KKTWWR | 28 |
| | 1121 | | |
| 2322 | 6mer-1- | RRTMGR | 33 |
| | 1122 | | |
| 2323 | 6mer-1- | RRDNVK | 41 |
| | 1123 | | |
| 2324 | 6mer-1- | KKDEIR | 21 |
| | 1124 | | |
| 2325 | 6mer-1- | KKPTDR | 26 |
| | 1125 | | |
| 2326 | 6mer-1- | RRHCDK | 41 |
| | 1126 | | |
| 2327 | 6mer-1- | RKMMK | 34 |
| | 1127 | | |
| 2328 | 6mer-1- | KKKKPK | 39 |
| | 1128 | | |
| 2329 | 6mer-1- | RKDHAR | 39 |
| | 1129 | | |
| 2330 | 6mer-1- | RKATFR | 31 |
| | 1130 | | |
| 2331 | 6mer-1- | RKDNIK | 42 |
| | 1131 | | |
| 2332 | 6mer-1- | RRKAER | 31 |
| | 1132 | | |
| 2333 | 6mer-1- | KKPNIK | 24 |
| | 1133 | | |
| 2334 | 6mer-1- | KRMSWK | 22 |
| | 1134 | | |
| 2335 | 6mer-1- | KKHTER | 26 |
| | 1135 | | |
| 2336 | 6mer-1- | KKIEIK | 34 |
| | 1136 | | |
| 2337 | 6mer-1- | KRFTDK | 33 |
| | 1137 | | |
| 2338 | 6mer-1- | KRDCFR | 21 |
| | 1138 | | |
| 2339 | 6mer-1- | KKMENR | 36 |
| | 1139 | | |
| 2340 | 6mer-1- | KRATMK | 43 |
| | 1140 | | |
| 2341 | 6mer-1- | KRNMHK | 40 |
| | 1141 | | |
| 2342 | 6mer-1- | KKETPR | 24 |
| | 1142 | | |
| 2343 | 6mer-1- | KRHEFK | 32 |
| | 1143 | | |
| 2344 | 6mer-1- | KKCMGR | 25 |
| | 1144 | | |
| 2345 | 6mer-1- | RRDCKK | 40 |
| | 1145 | | |
| 2346 | 6mer-1- | KKMMPK | 34 |
| | 1146 | | |
| 2347 | 6mer-1- | RKAPHR | 35 |
| | 1147 | | |
| 2348 | 6mer-1- | RRCSHR | 31 |
| | 1148 | | |
| 2349 | 6mer-1- | RKMTPK | 30 |
| | 1149 | | |
| 2350 | 6mer-1- | KRKWWR | 34 |
| | 1150 | | |
| 2351 | 6mer-1- | KKKEAK | 34 |
| | 1151 | | |
| 2352 | 6mer-1- | RKYKEK | 23 |
| | 1152 | | |
| 2353 | 6mer-1- | RKHNKK | 23 |
| | 1153 | | |
| 2354 | 6mer-1- | RKCEKR | 41 |
| | 1154 | | |
| 2355 | 6mer-1- | RKKEKR | 28 |
| | 1155 | | |
| 2356 | 6mer-1- | KRYTVR | 37 |
| | 1156 | | |
| 2357 | 6mer-1- | RKESVR | 36 |
| | 1157 | | |
| 2358 | 6mer-1- | RKPMMK | 33 |
| | 1158 | | |
| 2359 | 6mer-1- | RRAWPR | 39 |
| | 1159 | | |
| 2360 | 6mer-1- | RRDWAK | 29 |
| | 1160 | | |
| 2361 | 6mer-1- | KRHWVK | 40 |
| | 1161 | | |
| 2362 | 6mer-1- | KKCDHR | 41 |
| | 1162 | | |
| 2363 | 6mer-1- | RKCAFK | 21 |
| | 1163 | | |
| 2364 | 6mer-1- | KKHHAK | 41 |
| | 1164 | | |
| 2365 | 6mer-1- | RRATWR | 29 |
| | 1165 | | |
| 2366 | 6mer-1- | KKEEKR | 22 |
| | 1166 | | |
| 2367 | 6mer-1- | KRHMMK | 42 |
| | 1167 | | |
| 2368 | 6mer-1- | KKEKFR | 40 |
| | 1168 | | |
| 2369 | 6mer-1- | RKMDIR | 32 |
| | 1169 | | |
| 2370 | 6mer-1- | KKYNPK | 25 |
| | 1170 | | |
| 2371 | 6mer-1- | RKIAFK | 40 |
| | 1171 | | |
| 2372 | 6mer-1- | RRFNFR | 23 |
| | 1172 | | |
| 2373 | 6mer-1- | KKIPMK | 26 |
| | 1173 | | |
| 2374 | 6mer-1- | RKDAIR | 30 |
| | 1174 | | |
| 2375 | 6mer-1- | RKTWEK | 23 |
| | 1175 | | |
| 2376 | 6mer-1- | KKADHK | 21 |
| | 1176 | | |
| 2377 | 6mer-1- | RRHTMR | 21 |
| | 1177 | | |
| 2378 | 6mer-1- | RKKMAK | 29 |
| | 1178 | | |
| 2379 | 6mer-1- | KRMTPR | 40 |
| | 1179 | | |
| 2380 | 6mer-1- | KRPPPK | 34 |
| | 1180 | | |
| 2381 | 6mer-1- | RRMDAK | 21 |
| | 1181 | | |
| 2382 | 6mer-1- | KKTCHR | 35 |
| | 1182 | | |
| 2383 | 6mer-1- | RKIHNK | 35 |
| | 1183 | | |
| 2384 | 6mer-1- | RRDTVK | 30 |
| | 1184 | | |
| 2385 | 6mer-1- | KKEMMK | 29 |
| | 1185 | | |
| 2386 | 6mer-1- | KKNNAK | 37 |
| | 1186 | | |
| 2387 | 6mer-1- | RRHAHK | 26 |
| | 1187 | | |
| 2388 | 6mer-1- | RRMNER | 41 |
| | 1188 | | |
| 2389 | 6mer-1- | KKCHWR | 40 |
| | 1189 | | |
| 2390 | 6mer-1- | KKCMKR | 29 |
| | 1190 | | |
| 2391 | 6mer-1- | RKYTKK | 39 |
| | 1191 | | |
| 2392 | 6mer-1- | RKDDDR | 36 |
| | 1192 | | |
| 2393 | 6mer-1- | KKPTNK | 33 |
| | 1193 | | |
| 2394 | 6mer-1- | KKTHAK | 22 |
| | 1194 | | |
| 2395 | 6mer-1- | KRDEDK | 25 |
| | 1195 | | |
| 2396 | 6mer-1- | KKTTGR | 25 |
| | 1196 | | |
| 2397 | 6mer-1- | KRPMAK | 21 |
| | 1197 | | |
| 2398 | 6mer-1- | RRATER | 28 |
| | 1198 | | |
| 2399 | 6mer-1- | KKTNKR | 39 |
| | 1199 | | |
| 2400 | 6mer-1- | RKACEK | 21 |
| | 1200 | | |

| | |
|---|---|
| Average Binding affinity | 27.17 |

TABLE 12
6mer-2 Top sequence

| SEQ ID | Unique | | Binding |
|---|---|---|---|
| NO: | No. | Sequence | affinity |
| 2401 | 6mer-2-1 | RRRLKK | 131 |
| 2402 | 6mer-2-2 | RWYLKR | 139 |
| 2403 | 6mer-2-3 | KVYSRK | 148 |
| 2404 | 6mer-2-4 | RSYYRR | 125 |
| 2405 | 6mer-2-5 | RWVSKR | 124 |
| 2406 | 6mer-2-6 | KSICRR | 122 |
| 2407 | 6mer-2-7 | KSRCRK | 126 |
| 2408 | 6mer-2-8 | KSLQKK | 135 |
| 2409 | 6mer-2-9 | KLICRK | 139 |
| 2410 | 6mer-2- | KVFSKK | 124 |
| | 10 | | |
| 2411 | 6mer-2- | RQYQRR | 121 |
| | 11 | | |
| 2412 | 6mer-2- | RQFQRK | 147 |
| | 12 | | |
| 2413 | 6mer-2- | RQYTRK | 123 |
| | 13 | | |
| 2414 | 6mer-2- | RGRQKK | 153 |
| | 14 | | |
| 2415 | 6mer-2- | KQVRKR | 133 |
| | 15 | | |
| 2416 | 6mer-2- | KGVCRR | 121 |
| | 16 | | |
| 2417 | 6mer-2- | RWVTRR | 142 |
| | 17 | | |
| 2418 | 6mer-2- | RSILRR | 124 |
| | 18 | | |
| 2419 | 6mer-2- | RSFSKK | 135 |
| | 19 | | |
| 2420 | 6mer-2- | RVQTRR | 137 |
| | 20 | | |
| 2421 | 6mer-2- | RLFTRK | 141 |
| | 21 | | |
| 2422 | 6mer-2- | RQIRKK | 124 |
| | 22 | | |
| 2423 | 6mer-2- | RWVRKK | 148 |
| | 23 | | |
| 2424 | 6mer-2- | KGIQRK | 141 |
| | 24 | | |
| 2425 | 6mer-2- | KQVQKR | 148 |
| | 25 | | |
| 2426 | 6mer-2- | RWRRKK | 121 |
| | 26 | | |
| 2427 | 6mer-2- | KVIRRK | 128 |
| | 27 | | |
| 2428 | 6mer-2- | KVLSRK | 142 |
| | 28 | | |
| 2429 | 6mer-2- | RSQRKR | 142 |
| | 29 | | |
| 2430 | 6mer-2- | RQFYKK | 139 |
| | 30 | | |
| 2431 | 6mer-2- | KSYQRK | 121 |
| | 31 | | |
| 2432 | 6mer-2- | RRLCRK | 139 |
| | 32 | | |
| 2433 | 6mer-2- | RQFRKK | 142 |
| | 33 | | |
| 2434 | 6mer-2- | KVFRRK | 124 |
| | 34 | | |
| 2435 | 6mer-2- | RWISRK | 148 |
| | 35 | | |
| 2436 | 6mer-2- | RRLQKK | 131 |
| | 36 | | |
| 2437 | 6mer-2- | KLLYRK | 148 |
| | 37 | | |
| 2438 | 6mer-2- | RSYYKR | 136 |
| | 38 | | |
| 2439 | 6mer-2- | RWRYRK | 137 |
| | 39 | | |
| 2440 | 6mer-2- | RRYRKK | 153 |
| | 40 | | |
| 2441 | 6mer-2- | KQLCKR | 142 |
| | 41 | | |
| 2442 | 6mer-2- | KLLSKR | 126 |
| | 42 | | |
| 2443 | 6mer-2- | RVITKR | 146 |
| | 43 | | |
| 2444 | 6mer-2- | KSVRRK | 145 |
| | 44 | | |
| 2445 | 6mer-2- | RSLTKK | 121 |
| | 45 | | |
| 2446 | 6mer-2- | KLYLKR | 153 |
| | 46 | | |
| 2447 | 6mer-2- | KLQSRR | 148 |
| | 47 | | |
| 2448 | 6mer-2- | RRFRKK | 153 |
| | 48 | | |
| 2449 | 6mer-2- | RLRCRK | 154 |
| | 49 | | |
| 2450 | 6mer-2- | RSQSKR | 125 |
| | 50 | | |
| 2451 | 6mer-2- | KQFLKK | 139 |
| | 51 | | |
| 2452 | 6mer-2- | KRQRKK | 136 |
| | 52 | | |
| 2453 | 6mer-2- | KSLSRR | 125 |
| | 53 | | |
| 2454 | 6mer-2- | KGRRRR | 124 |
| | 54 | | |
| 2455 | 6mer-2- | RLFYKK | 125 |
| | 55 | | |
| 2456 | 6mer-2- | RSQLRR | 149 |
| | 56 | | |
| 2457 | 6mer-2- | KQRCRR | 139 |
| | 57 | | |
| 2458 | 6mer-2- | KRLQRK | 122 |
| | 58 | | |
| 2459 | 6mer-2- | RVLSRK | 123 |
| | 59 | | |
| 2460 | 6mer-2- | RRLSKK | 148 |
| | 60 | | |
| 2461 | 6mer-2- | RGFQRK | 148 |
| | 61 | | |
| 2462 | 6mer-2- | RLVTKR | 147 |
| | 62 | | |
| 2463 | 6mer-2- | KSFRKR | 121 |
| | 63 | | |
| 2464 | 6mer-2- | KSVSKK | 136 |
| | 64 | | |
| 2465 | 6mer-2- | KGVCKR | 148 |
| | 65 | | |
| 2466 | 6mer-2- | RVIRRR | 123 |
| | 66 | | |
| 2467 | 6mer-2- | KLFCKK | 124 |
| | 67 | | |
| 2468 | 6mer-2- | KGRRRK | 142 |
| | 68 | | |
| 2469 | 6mer-2- | KWFLRK | 139 |
| | 69 | | |
| 2470 | 6mer-2- | KRLLRK | 126 |
| | 70 | | |
| 2471 | 6mer-2- | KQVYKR | 141 |
| | 71 | | |
| 2472 | 6mer-2- | KRIQKK | 144 |
| | 72 | | |
| 2473 | 6mer-2- | RLYTKR | 139 |
| | 73 | | |
| 2474 | 6mer-2- | RWIYKR | 136 |
| | 74 | | |
| 2475 | 6mer-2- | KLYTRK | 133 |
| | 75 | | |
| 2476 | 6mer-2- | RRQSRK | 142 |
| | 76 | | |
| 2477 | 6mer-2- | KQQTRR | 123 |
| | 77 | | |
| 2478 | 6mer-2- | KRYLKR | 135 |
| | 78 | | |
| 2479 | 6mer-2- | RQLSKR | 135 |
| | 79 | | |
| 2480 | 6mer-2- | RRQYKR | 148 |
| | 80 | | |
| 2481 | 6mer-2- | RRVSRR | 121 |
| | 81 | | |
| 2482 | 6mer-2- | RGVQKK | 124 |
| | 82 | | |
| 2483 | 6mer-2- | KQYQRR | 135 |
| | 83 | | |
| 2484 | 6mer-2- | KQRYKK | 139 |
| | 84 | | |
| 2485 | 6mer-2- | KSQYKR | 137 |
| | 85 | | |
| 2486 | 6mer-2- | KQFRRK | 126 |
| | 86 | | |
| 2487 | 6mer-2- | RRLTKR | 142 |
| | 87 | | |
| 2488 | 6mer-2- | KSFQRR | 141 |
| | 88 | | |
| 2489 | 6mer-2- | KSRSKK | 141 |
| | 89 | | |
| 2490 | 6mer-2- | KGRTKR | 133 |
| | 90 | | |
| 2491 | 6mer-2- | KWIYKR | 121 |
| | 91 | | |
| 2492 | 6mer-2- | KVVCKR | 131 |
| | 92 | | |
| 2493 | 6mer-2- | RWQTRR | 133 |
| | 93 | | |
| 2494 | 6mer-2- | RLYQRK | 126 |
| | 94 | | |
| 2495 | 6mer-2- | RRIYRK | 142 |
| | 95 | | |
| 2496 | 6mer-2- | KWRQRK | 154 |
| | 96 | | |
| 2497 | 6mer-2- | RQFYRK | 154 |
| | 97 | | |
| 2498 | 6mer-2- | RRQQRR | 148 |
| | 98 | | |
| 2499 | 6mer-2- | RQRSRR | 151 |
| | 99 | | |
| 2500 | 6mer-2- | RRRCRR | 142 |
| | 100 | | |
| 2501 | 6mer-2- | RLICRK | 154 |
| | 101 | | |
| 2502 | 6mer-2- | KVYQKK | 139 |
| | 102 | | |
| 2503 | 6mer-2- | RVVTKK | 136 |
| | 103 | | |
| 2504 | 6mer-2- | RGVCRK | 145 |
| | 104 | | |
| 2505 | 6mer-2- | RGFTRR | 151 |
| | 105 | | |
| 2506 | 6mer-2- | RWVQRK | 123 |
| | 106 | | |
| 2507 | 6mer-2- | RGVYRK | 144 |
| | 107 | | |
| 2508 | 6mer-2- | RVVYKK | 153 |
| | 108 | | |
| 2509 | 6mer-2- | RRVYRK | 144 |
| | 109 | | |
| 2510 | 6mer-2- | KSQLKK | 153 |
| | 110 | | |
| 2511 | 6mer-2- | KLIRRK | 123 |
| | 111 | | |
| 2512 | 6mer-2- | RLQQKR | 142 |
| | 112 | | |
| 2513 | 6mer-2- | KRYSRK | 145 |
| | 113 | | |
| 2514 | 6mer-2- | KLQYRK | 121 |
| | 114 | | |
| 2515 | 6mer-2- | KWQYRK | 144 |
| | 115 | | |
| 2516 | 6mer-2- | KLQRKK | 126 |
| | 116 | | |
| 2517 | 6mer-2- | KRYTRK | 148 |
| | 117 | | |
| 2518 | 6mer-2- | KWFSRR | 135 |
| | 118 | | |
| 2519 | 6mer-2- | RSISKK | 139 |
| | 119 | | |
| 2520 | 6mer-2- | RRQCRK | 146 |
| | 120 | | |
| 2521 | 6mer-2- | KRVYRK | 137 |
| | 121 | | |
| 2522 | 6mer-2- | RVITKK | 125 |
| | 122 | | |
| 2523 | 6mer-2- | RQFTKR | 146 |
| | 123 | | |
| 2524 | 6mer-2- | KWQLKR | 126 |
| | 124 | | |
| 2525 | 6mer-2- | KVQLRR | 142 |
| | 125 | | |
| 2526 | 6mer-2- | KWLYRR | 148 |
| | 126 | | |
| 2527 | 6mer-2- | RLYLRK | 136 |
| | 127 | | |
| 2528 | 6mer-2- | KSYYRR | 147 |
| | 128 | | |
| 2529 | 6mer-2- | KSVLRK | 139 |
| | 129 | | |
| 2530 | 6mer-2- | RGVCRR | 122 |
| | 130 | | |
| 2531 | 6mer-2- | KQQTKR | 148 |
| | 131 | | |
| 2532 | 6mer-2- | KLYCKK | 139 |
| | 132 | | |
| 2533 | 6mer-2- | KRRLKK | 145 |
| | 133 | | |
| 2534 | 6mer-2- | RLFQRK | 148 |
| | 134 | | |
| 2535 | 6mer-2- | RWFYKK | 124 |
| | 135 | | |
| 2536 | 6mer-2- | RWRYKR | 194 |
| | 136 | | |
| 2537 | 6mer-2- | KVFCKK | 135 |
| | 137 | | |
| 2538 | 6mer-2- | KQRRRK | 153 |
| | 138 | | |
| 2539 | 6mer-2- | KLFRKK | 149 |
| | 139 | | |
| 2540 | 6mer-2- | KGRLKK | 142 |
| | 140 | | |
| 2541 | 6mer-2- | KWYQKK | 154 |
| | 141 | | |
| 2542 | 6mer-2- | RWVLRR | 121 |
| | 142 | | |
| 2543 | 6mer-2- | RRVCRR | 128 |
| | 143 | | |
| 2544 | 6mer-2- | KSIRRK | 133 |
| | 144 | | |
| 2545 | 6mer-2- | RQYYKK | 128 |
| | 145 | | |
| 2546 | 6mer-2- | KQLLKR | 135 |
| | 146 | | |
| 2547 | 6mer-2- | RQYTKR | 133 |
| | 147 | | |
| 2548 | 6mer-2- | KGQYKK | 145 |
| | 148 | | |
| 2549 | 6mer-2- | KGQQRK | 127 |
| | 149 | | |
| 2550 | 6mer-2- | KRILKR | 136 |
| | 150 | | |
| 2551 | 6mer-2- | KQLRKR | 142 |
| | 151 | | |
| 2552 | 6mer-2- | RQFYKR | 139 |
| | 152 | | |
| 2553 | 6mer-2- | RVYSRR | 124 |
| | 153 | | |
| 2554 | 6mer-2- | KRVTKR | 148 |
| | 154 | | |
| 2555 | 6mer-2- | KGVYKK | 139 |
| | 155 | | |
| 2556 | 6mer-2- | KGLQRR | 127 |
| | 156 | | |
| 2557 | 6mer-2- | RSYRKK | 153 |
| | 157 | | |
| 2558 | 6mer-2- | RSFLRR | 145 |
| | 158 | | |
| 2559 | 6mer-2- | RQYYRK | 127 |
| | 159 | | |
| 2560 | 6mer-2- | RVRRKK | 121 |
| | 160 | | |
| 2561 | 6mer-2- | KWRRKK | 154 |
| | 161 | | |
| 2562 | 6mer-2- | KVISKR | 136 |
| | 162 | | |
| 2563 | 6mer-2- | KWFYRR | 149 |
| | 163 | | |
| 2564 | 6mer-2- | KRQRRK | 135 |
| | 164 | | |
| 2565 | 6mer-2- | KWFTRR | 139 |
| | 165 | | |
| 2566 | 6mer-2- | RWLRKR | 125 |
| | 166 | | |
| 2567 | 6mer-2- | KLFQKR | 145 |
| | 167 | | |
| 2568 | 6mer-2- | RVFLKR | 135 |
| | 168 | | |
| 2569 | 6mer-2- | KRQSRR | 123 |
| | 169 | | |
| 2570 | 6mer-2- | RQYQKK | 128 |
| | 170 | | |
| 2571 | 6mer-2- | RQQTRR | 139 |
| | 171 | | |
| 2572 | 6mer-2- | KVIRKK | 128 |
| | 172 | | |
| 2573 | 6mer-2- | RQQCKK | 127 |
| | 173 | | |
| 2574 | 6mer-2- | KLLRKR | 142 |
| | 174 | | |
| 2575 | 6mer-2- | KVYLRK | 137 |
| | 175 | | |
| 2576 | 6mer-2- | RWIYRR | 144 |
| | 176 | | |
| 2577 | 6mer-2- | RSVTKK | 136 |
| | 177 | | |
| 2578 | 6mer-2- | KWLLRR | 133 |
| | 178 | | |
| 2579 | 6mer-2- | RRVYRR | 121 |
| | 179 | | |
| 2580 | 6mer-2- | RLRLKR | 142 |
| | 180 | | |
| 2581 | 6mer-2- | RWQQKK | 139 |
| | 181 | | |
| 2582 | 6mer-2- | KLFYKK | 139 |
| | 182 | | |
| 2583 | 6mer-2- | RLQLRR | 154 |
| | 183 | | |
| 2584 | 6mer-2- | KWVSRR | 136 |
| | 184 | | |
| 2585 | 6mer-2- | RGYQKR | 137 |
| | 185 | | |
| 2586 | 6mer-2- | KQICRK | 127 |
| | 186 | | |
| 2587 | 6mer-2- | KRRRRK | 145 |
| | 187 | | |
| 2588 | 6mer-2- | RGYTKR | 142 |
| | 188 | | |
| 2589 | 6mer-2- | RWQCKK | 121 |
| | 189 | | |
| 2590 | 6mer-2- | KVYLKR | 148 |
| | 190 | | |
| 2591 | 6mer-2- | RQLLKR | 154 |
| | 191 | | |
| 2592 | 6mer-2- | RWFSKK | 133 |
| | 192 | | |
| 2593 | 6mer-2- | KWISKR | 127 |
| | 193 | | |
| 2594 | 6mer-2- | KLRLRK | 154 |
| | 194 | | |
| 2595 | 6mer-2- | KSRQKR | 154 |
| | 195 | | |
| 2596 | 6mer-2- | KSQRKK | 121 |
| | 196 | | |
| 2597 | 6mer-2- | RGQYRR | 126 |
| | 197 | | |
| 2598 | 6mer-2- | KWYYRK | 139 |
| | 198 | | |
| 2599 | 6mer-2- | RGQYKR | 137 |
| | 199 | | |
| 2600 | 6mer-2- | RGVQRK | 121 |
| | 200 | | |
| 2601 | 6mer-2- | KLFLRR | 148 |
| | 201 | | |
| 2602 | 6mer-2- | RLIYKK | 122 |
| | 202 | | |
| 2603 | 6mer-2- | KSRTKR | 135 |
| | 203 | | |
| 2604 | 6mer-2- | RRVQKR | 142 |
| | 204 | | |
| 2605 | 6mer-2- | KSFQRK | 147 |
| | 205 | | |
| 2606 | 6mer-2- | KWQYKK | 148 |
| | 206 | | |
| 2607 | 6mer-2- | KWVSKR | 153 |
| | 207 | | |
| 2608 | 6mer-2- | RSQQRK | 128 |
| | 208 | | |
| 2609 | 6mer-2- | RLYYRK | 148 |
| | 209 | | |
| 2610 | 6mer-2- | RSQSRR | 128 |
| | 210 | | |
| 2611 | 6mer-2- | RGLSRR | 135 |
| | 211 | | |
| 2612 | 6mer-2- | KWQLRR | 148 |
| | 212 | | |
| 2613 | 6mer-2- | KSILRR | 142 |
| | 213 | | |
| 2614 | 6mer-2- | RWRSRK | 139 |
| | 214 | | |
| 2615 | 6mer-2- | RLYYRR | 123 |
| | 215 | | |
| 2616 | 6mer-2- | KGILKK | 126 |
| | 216 | | |
| 2617 | 6mer-2- | KLFQKK | 135 |
| | 217 | | |
| 2618 | 6mer-2- | KGVSKK | 147 |
| | 218 | | |
| 2619 | 6mer-2- | RGVSKR | 153 |
| | 219 | | |
| 2620 | 6mer-2- | KVYSKR | 135 |
| | 220 | | |
| 2621 | 6mer-2- | KQVRKK | 153 |
| | 221 | | |
| 2622 | 6mer-2- | RVVYRK | 127 |
| | 222 | | |
| 2623 | 6mer-2- | KQLTRR | 142 |
| | 223 | | |
| 2624 | 6mer-2- | RLFLKR | 148 |
| | 224 | | |
| 2625 | 6mer-2- | KRLLRR | 145 |
| | 225 | | |
| 2626 | 6mer-2- | RLLCKR | 154 |
| | 226 | | |
| 2627 | 6mer-2- | KLQRRK | 147 |
| | 227 | | |
| 2628 | 6mer-2- | KGQCKK | 141 |
| | 228 | | |
| 2629 | 6mer-2- | RWQSKK | 127 |
| | 229 | | |
| 2630 | 6mer-2- | RWIQRR | 135 |
| | 230 | | |
| 2631 | 6mer-2- | KGISKK | 144 |
| | 231 | | |
| 2632 | 6mer-2- | KQFTRK | 135 |
| | 232 | | |
| 2633 | 6mer-2- | KWRQKR | 190 |
| | 233 | | |
| 2634 | 6mer-2- | RSQTKR | 142 |
| | 234 | | |
| 2635 | 6mer-2- | KLVRKK | 136 |
| | 235 | | |
| 2636 | 6mer-2- | KWQQKK | 131 |
| | 236 | | |
| 2637 | 6mer-2- | RLVYKR | 123 |
| | 237 | | |
| 2638 | 6mer-2- | RRRRRK | 142 |
| | 238 | | |
| 2639 | 6mer-2- | RGQYKK | 125 |
| | 239 | | |
| 2640 | 6mer-2- | RRRCRK | 142 |
| | 240 | | |
| 2641 | 6mer-2- | KQLTKR | 135 |
| | 241 | | |
| 2642 | 6mer-2- | KSQRRR | 135 |
| | 242 | | |
| 2643 | 6mer-2- | KRVLKR | 148 |
| | 243 | | |
| 2644 | 6mer-2- | RRFSKR | 139 |
| | 244 | | |
| 2645 | 6mer-2- | RSLSKR | 135 |
| | 245 | | |
| 2646 | 6mer-2- | KWISKK | 123 |
| | 246 | | |
| 2647 | 6mer-2- | KGYQKK | 146 |
| | 247 | | |
| 2648 | 6mer-2- | RSYTRR | 154 |
| | 248 | | |
| 2649 | 6mer-2- | RGLRKR | 136 |
| | 249 | | |
| 2650 | 6mer-2- | KRRRKK | 145 |
| | 250 | | |
| 2651 | 6mer-2- | KSQTKR | 142 |
| | 251 | | |
| 2652 | 6mer-2- | KVFRKK | 148 |
| | 252 | | |
| 2653 | 6mer-2- | KLRSRR | 145 |
| | 253 | | |
| 2654 | 6mer-2- | KRIQRR | 148 |
| | 254 | | |
| 2655 | 6mer-2- | RLRRKK | 139 |
| | 255 | | |
| 2656 | 6mer-2- | KSQQKR | 142 |
| | 256 | | |
| 2657 | 6mer-2- | KRFCRK | 144 |
| | 257 | | |
| 2658 | 6mer-2- | KRIYRR | 125 |
| | 258 | | |
| 2659 | 6mer-2- | RVQSKR | 128 |
| | 259 | | |
| 2660 | 6mer-2- | RRFCKR | 142 |
| | 260 | | |
| 2661 | 6mer-2- | RWYTKK | 121 |
| | 261 | | |
| 2662 | 6mer-2- | KWILKR | 142 |
| | 262 | | |
| 2663 | 6mer-2- | RRICKR | 145 |
| | 263 | | |
| 2664 | 6mer-2- | KSQLKR | 127 |
| | 264 | | |
| 2665 | 6mer-2- | RRQTRK | 135 |
| | 265 | | |
| 2666 | 6mer-2- | RWQTKK | 131 |
| | 266 | | |
| 2667 | 6mer-2- | KLYSRR | 141 |
| | 267 | | |
| 2668 | 6mer-2- | RQICKK | 139 |
| | 268 | | |
| 2669 | 6mer-2- | KWVQRK | 123 |
| | 269 | | |
| 2670 | 6mer-2- | KSRLRR | 148 |
| | 270 | | |
| 2671 | 6mer-2- | RLFQKK | 131 |
| | 271 | | |
| 2672 | 6mer-2- | KWRSRK | 154 |
| | 272 | | |
| 2673 | 6mer-2- | KLRQRR | 131 |
| | 273 | | |
| 2674 | 6mer-2- | KLRTKR | 148 |
| | 274 | | |
| 2675 | 6mer-2- | KLITRR | 135 |
| | 275 | | |
| 2676 | 6mer-2- | RLVCRK | 153 |
| | 276 | | |
| 2677 | 6mer-2- | RLRYRK | 128 |
| | 277 | | |
| 2678 | 6mer-2- | RQIQKK | 135 |
| | 278 | | |
| 2679 | 6mer-2- | KSLQRK | 148 |
| | 279 | | |
| 2680 | 6mer-2- | KSIYRR | 153 |
| | 280 | | |
| 2681 | 6mer-2- | KGQRKK | 149 |
| | 281 | | |
| 2682 | 6mer-2- | RQQYRK | 151 |
| | 282 | | |
| 2683 | 6mer-2- | KLISKR | 148 |
| | 283 | | |
| 2684 | 6mer-2- | KLRSKR | 151 |
| | 284 | | |
| 2685 | 6mer-2- | RRIQRR | 142 |
| | 285 | | |
| 2686 | 6mer-2- | KRRYKK | 139 |
| | 286 | | |
| 2687 | 6mer-2- | RLYLKR | 124 |
| | 287 | | |
| 2688 | 6mer-2- | KSRLRK | 122 |
| | 288 | | |
| 2689 | 6mer-2- | RLLQKK | 146 |
| | 289 | | |
| 2690 | 6mer-2- | RQLYRK | 135 |
| | 290 | | |
| 2691 | 6mer-2- | RRYRKR | 154 |
| | 291 | | |
| 2692 | 6mer-2- | RQLCKR | 121 |
| | 292 | | |
| 2693 | 6mer-2- | KQQSKR | 153 |
| | 293 | | |
| 2694 | 6mer-2- | KLYYRR | 135 |
| | 294 | | |
| 2695 | 6mer-2- | KVRYKK | 145 |
| | 295 | | |
| 2696 | 6mer-2- | KWYRRK | 135 |
| | 296 | | |
| 2697 | 6mer-2- | RSLSRR | 139 |
| | 297 | | |
| 2698 | 6mer-2- | KWICKK | 149 |
| | 298 | | |
| 2699 | 6mer-2- | RWYYRK | 141 |
| | 299 | | |
| 2700 | 6mer-2- | RWRLKK | 153 |
| | 300 | | |
| 2701 | 6mer-2- | RQVRKR | 122 |
| | 301 | | |
| 2702 | 6mer-2- | KQICKK | 148 |
| | 302 | | |
| 2703 | 6mer-2- | KVFTKR | 126 |
| | 303 | | |
| 2704 | 6mer-2- | KWFYRK | 144 |
| | 304 | | |
| 2705 | 6mer-2- | KQFYKK | 154 |
| | 305 | | |
| 2706 | 6mer-2- | RQFQKR | 141 |
| | 306 | | |
| 2707 | 6mer-2- | RLRSKK | 141 |
| | 307 | | |
| 2708 | 6mer-2- | KGISKR | 148 |
| | 308 | | |
| 2709 | 6mer-2- | KRRRRR | 151 |
| | 309 | | |
| 2710 | 6mer-2- | KLFQRK | 149 |
| | 310 | | |
| 2711 | 6mer-2- | KVVTRK | 147 |
| | 311 | | |
| 2712 | 6mer-2- | KWRTKR | 121 |
| | 312 | | |
| 2713 | 6mer-2- | RWRTKR | 154 |
| | 313 | | |
| 2714 | 6mer-2- | KQYCKK | 127 |
| | 314 | | |
| 2715 | 6mer-2- | RRQRRR | 139 |
| | 315 | | |
| 2716 | 6mer-2- | KGIRRR | 139 |
| | 316 | | |
| 2717 | 6mer-2- | RGLYKR | 135 |
| | 317 | | |
| 2718 | 6mer-2- | RGIQKK | 145 |
| | 318 | | |
| 2719 | 6mer-2- | RSRQRK | 137 |
| | 319 | | |
| 2720 | 6mer-2- | RQYRRK | 148 |
| | 320 | | |
| 2721 | 6mer-2- | KLVSRK | 139 |
| | 321 | | |
| 2722 | 6mer-2- | RRYSRR | 148 |
| | 322 | | |
| 2723 | 6mer-2- | KVLLRK | 145 |
| | 323 | | |
| 2724 | 6mer-2- | KLQSRK | 139 |
| | 324 | | |
| 2725 | 6mer-2- | RVFSRK | 142 |
| | 325 | | |
| 2726 | 6mer-2- | RGFYKK | 142 |
| | 326 | | |
| 2727 | 6mer-2- | KGLRKR | 153 |
| | 327 | | |
| 2728 | 6mer-2- | KRYQRK | 131 |
| | 328 | | |
| 2729 | 6mer-2- | RVYTKR | 142 |
| | 329 | | |
| 2730 | 6mer-2- | KQLRKK | 139 |
| | 330 | | |
| 2731 | 6mer-2- | RWVSKK | 148 |
| | 331 | | |
| 2732 | 6mer-2- | RRQYKK | 145 |
| | 332 | | |
| 2733 | 6mer-2- | KRFRRK | 139 |
| | 333 | | |
| 2734 | 6mer-2- | KVILRR | 146 |
| | 334 | | |
| 2735 | 6mer-2- | KWRSRR | 153 |
| | 335 | | |
| 2736 | 6mer-2- | KLITKR | 135 |
| | 336 | | |
| 2737 | 6mer-2- | KQFQKK | 142 |
| | 337 | | |
| 2738 | 6mer-2- | RSVQKR | 145 |
| | 338 | | |
| 2739 | 6mer-2- | KQVYKK | 151 |
| | 339 | | |
| 2740 | 6mer-2- | RRLTRR | 122 |
| | 340 | | |
| 2741 | 6mer-2- | KVVTKR | 144 |
| | 341 | | |
| 2742 | 6mer-2- | KRYRKK | 145 |
| | 342 | | |
| 2743 | 6mer-2- | KQISKK | 146 |
| | 343 | | |
| 2744 | 6mer-2- | KGIRRK | 148 |
| | 344 | | |
| 2745 | 6mer-2- | KSRQKK | 148 |
| | 345 | | |
| 2746 | 6mer-2- | KRFSKK | 153 |
| | 346 | | |
| 2747 | 6mer-2- | RRYSKK | 148 |
| | 347 | | |
| 2748 | 6mer-2- | KSQLRR | 153 |
| | 348 | | |
| 2749 | 6mer-2- | RRLSRR | 137 |
| | 349 | | |
| 2750 | 6mer-2- | RGQTRK | 148 |
| | 350 | | |
| 2751 | 6mer-2- | KLYTKR | 135 |
| | 351 | | |
| 2752 | 6mer-2- | RWFYRR | 137 |
| | 352 | | |
| 2753 | 6mer-2- | RLQTKK | 137 |
| | 353 | | |
| 2754 | 6mer-2- | RWISKK | 135 |
| | 354 | | |
| 2755 | 6mer-2- | RGIRKK | 124 |
| | 355 | | |
| 2756 | 6mer-2- | RLLQRR | 145 |
| | 356 | | |
| 2757 | 6mer-2- | RGQRKK | 151 |
| | 357 | | |
| 2758 | 6mer-2- | RQIYKK | 154 |
| | 358 | | |
| 2759 | 6mer-2- | RLFCKK | 136 |
| | 359 | | |
| 2760 | 6mer-2- | KGVRRR | 141 |
| | 360 | | |
| 2761 | 6mer-2- | RSFQRR | 153 |
| | 361 | | |
| 2762 | 6mer-2- | RGRQKR | 154 |
| | 362 | | |
| 2763 | 6mer-2- | KSIYRK | 147 |
| | 363 | | |
| 2764 | 6mer-2- | KVFTKK | 154 |
| | 364 | | |
| 2765 | 6mer-2- | RWRYRR | 121 |
| | 365 | | |
| 2766 | 6mer-2- | KQYYRR | 142 |
| | 366 | | |
| 2767 | 6mer-2- | RWRSRR | 142 |
| | 367 | | |
| 2768 | 6mer-2- | RLRTRR | 142 |
| | 368 | | |
| 2769 | 6mer-2- | KVVRRR | 145 |
| | 369 | | |
| 2770 | 6mer-2- | KSLLRR | 142 |
| | 370 | | |
| 2771 | 6mer-2- | KRLSRR | 148 |
| | 371 | | |
| 2772 | 6mer-2- | KLVQRR | 141 |
| | 372 | | |
| 2773 | 6mer-2- | KLIYRK | 139 |
| | 373 | | |
| 2774 | 6mer-2- | KRQLKK | 125 |
| | 374 | | |
| 2775 | 6mer-2- | RVVQKK | 131 |
| | 375 | | |
| 2776 | 6mer-2- | KQQCKR | 141 |
| | 376 | | |
| 2777 | 6mer-2- | RRYCRR | 142 |
| | 377 | | |
| 2778 | 6mer-2- | KRFQRK | 131 |
| | 378 | | |
| 2779 | 6mer-2- | RGVQKR | 127 |
| | 379 | | |
| 2780 | 6mer-2- | RLVYRK | 141 |
| | 380 | | |
| 2781 | 6mer-2- | KVYRRR | 139 |
| | 381 | | |
| 2782 | 6mer-2- | KSVSRR | 148 |
| | 382 | | |
| 2783 | 6mer-2- | KLVRRK | 128 |
| | 383 | | |
| 2784 | 6mer-2- | RSFQKK | 142 |
| | 384 | | |
| 2785 | 6mer-2- | RGVCKR | 154 |
| | 385 | | |
| 2786 | 6mer-2- | KWQSKR | 136 |
| | 386 | | |
| 2787 | 6mer-2- | KWLCKK | 146 |
| | 387 | | |
| 2788 | 6mer-2- | KRFQKK | 139 |
| | 388 | | |
| 2789 | 6mer-2- | KSLYKK | 153 |
| | 389 | | |
| 2790 | 6mer-2- | KWLRRR | 145 |
| | 390 | | |
| 2791 | 6mer-2- | KQYQKR | 141 |
| | 391 | | |
| 2792 | 6mer-2- | RQILKR | 149 |
| | 392 | | |
| 2793 | 6mer-2- | RGLQRK | 145 |
| | 393 | | |
| 2794 | 6mer-2- | KLVLKR | 141 |
| | 394 | | |
| 2795 | 6mer-2- | KWRYRR | 148 |
| | 395 | | |
| 2796 | 6mer-2- | KWLQRR | 122 |
| | 396 | | |
| 2797 | 6mer-2- | RSIYRK | 154 |
| | 397 | | |
| 2798 | 6mer-2- | RQQRRR | 141 |
| | 398 | | |
| 2799 | 6mer-2- | RWLTRR | 148 |
| | 399 | | |
| 2800 | 6mer-2- | RQIRRR | 154 |
| | 400 | | |
| 2801 | 6mer-2- | RSILRK | 153 |
| | 401 | | |
| 2802 | 6mer-2- | KRYSRR | 145 |
| | 402 | | |
| 2803 | 6mer-2- | KGVLRK | 123 |
| | 403 | | |
| 2804 | 6mer-2- | RVLSKR | 121 |
| | 404 | | |
| 2805 | 6mer-2- | KGYRKK | 137 |
| | 405 | | |
| 2806 | 6mer-2- | KGIYRR | 139 |
| | 406 | | |
| 2807 | 6mer-2- | KQVSKR | 122 |
| | 407 | | |
| 2808 | 6mer-2- | KQIYRR | 139 |
| | 408 | | |
| 2809 | 6mer-2- | KRRRKR | 139 |
| | 409 | | |
| 2810 | 6mer-2- | KRFRKK | 153 |
| | 410 | | |
| 2811 | 6mer-2- | RSRQKK | 121 |
| | 411 | | |
| 2812 | 6mer-2- | KRFLKK | 139 |
| | 412 | | |
| 2813 | 6mer-2- | RLILKR | 136 |
| | 413 | | |
| 2814 | 6mer-2- | KWRQKK | 135 |
| | 414 | | |
| 2815 | 6mer-2- | KGRCKK | 149 |
| | 415 | | |
| 2816 | 6mer-2- | RWRLRR | 131 |
| | 416 | | |
| 2817 | 6mer-2- | RWVYKK | 151 |
| | 417 | | |
| 2818 | 6mer-2- | RVQYKK | 121 |
| | 418 | | |
| 2819 | 6mer-2- | RSRYKK | 154 |
| | 419 | | |
| 2820 | 6mer-2- | RRQYRK | 128 |
| | 420 | | |
| 2821 | 6mer-2- | KVICRK | 124 |
| | 421 | | |
| 2822 | 6mer-2- | RLITRR | 154 |
| | 422 | | |
| 2823 | 6mer-2- | RLQYRK | 154 |
| | 423 | | |
| 2824 | 6mer-2- | RLYCKK | 139 |
| | 424 | | |
| 2825 | 6mer-2- | KLQTKK | 145 |
| | 425 | | |
| 2826 | 6mer-2- | KGQRRK | 141 |
| | 426 | | |
| 2827 | 6mer-2- | RLQRRR | 147 |
| | 427 | | |
| 2828 | 6mer-2- | KVFLKK | 142 |
| | 428 | | |
| 2829 | 6mer-2- | RWRQRK | 123 |
| | 429 | | |
| 2830 | 6mer-2- | RWFRRR | 139 |
| | 430 | | |
| 2831 | 6mer-2- | KLILKR | 135 |
| | 431 | | |
| 2832 | 6mer-2- | KVVRKR | 148 |
| | 432 | | |
| 2833 | 6mer-2- | RWIQKR | 139 |
| | 433 | | |
| 2834 | 6mer-2- | RVIRRK | 154 |
| | 434 | | |
| 2835 | 6mer-2- | RWVYKR | 154 |
| | 435 | | |
| 2836 | 6mer-2- | KVLYKR | 148 |
| | 436 | | |
| 2837 | 6mer-2- | KQVCKK | 121 |
| | 437 | | |
| 2838 | 6mer-2- | RLLCRK | 131 |
| | 438 | | |
| 2839 | 6mer-2- | KWFSKR | 153 |
| | 439 | | |
| 2840 | 6mer-2- | KQLSKK | 153 |
| | 440 | | |
| 2841 | 6mer-2- | KSQRKR | 139 |
| | 441 | | |
| 2842 | 6mer-2- | RLVQKR | 139 |
| | 442 | | |
| 2843 | 6mer-2- | RQYCRR | 122 |
| | 443 | | |
| 2844 | 6mer-2- | RQRLKK | 141 |
| | 444 | | |
| 2845 | 6mer-2- | RLVCKR | 145 |
| | 445 | | |
| 2846 | 6mer-2- | RQLQKK | 153 |
| | 446 | | |
| 2847 | 6mer-2- | RVYTKK | 139 |
| | 447 | | |
| 2848 | 6mer-2- | RSFRRR | 128 |
| | 448 | | |
| 2849 | 6mer-2- | RGRCRR | 154 |
| | 449 | | |
| 2850 | 6mer-2- | RQRYRK | 123 |
| | 450 | | |
| 2851 | 6mer-2- | RGRCKK | 148 |
| | 451 | | |
| 2852 | 6mer-2- | KGLYKR | 146 |
| | 452 | | |
| 2853 | 6mer-2- | RLVRKK | 141 |
| | 453 | | |
| 2854 | 6mer-2- | RSVQKK | 133 |
| | 454 | | |
| 2855 | 6mer-2- | RWYSKR | 135 |
| | 455 | | |
| 2856 | 6mer-2- | KSVTKR | 147 |
| | 456 | | |
| 2857 | 6mer-2- | RRVYKR | 146 |
| | 457 | | |
| 2858 | 6mer-2- | RRFQRR | 122 |
| | 458 | | |
| 2859 | 6mer-2- | KLFSRK | 139 |
| | 459 | | |
| 2860 | 6mer-2- | RSQCRK | 139 |
| | 460 | | |
| 2861 | 6mer-2- | KSVCRR | 149 |
| | 461 | | |
| 2862 | 6mer-2- | KQICKR | 145 |
| | 462 | | |
| 2863 | 6mer-2- | KLLTRR | 124 |
| | 463 | | |
| 2864 | 6mer-2- | KSFRKK | 135 |
| | 464 | | |
| 2865 | 6mer-2- | KGVSKR | 122 |
| | 465 | | |
| 2866 | 6mer-2- | RLLTRR | 142 |
| | 466 | | |
| 2867 | 6mer-2- | KQYSRR | 142 |
| | 467 | | |
| 2868 | 6mer-2- | RSFSKR | 133 |
| | 468 | | |
| 2869 | 6mer-2- | RLRTKK | 153 |
| | 469 | | |
| 2870 | 6mer-2- | RLRRRK | 153 |
| | 470 | | |
| 2871 | 6mer-2- | KWISRR | 136 |
| | 471 | | |
| 2872 | 6mer-2- | RSRLRR | 148 |
| | 472 | | |
| 2873 | 6mer-2- | RGRLRK | 131 |
| | 473 | | |
| 2874 | 6mer-2- | RWQQRR | 128 |
| | 474 | | |
| 2875 | 6mer-2- | KRFCRR | 139 |
| | 475 | | |
| 2876 | 6mer-2- | KGIRKK | 148 |
| | 476 | | |
| 2877 | 6mer-2- | RSRTRR | 135 |
| | 477 | | |
| 2878 | 6mer-2- | KWYTRK | 145 |
| | 478 | | |
| 2879 | 6mer-2- | KWRLKK | 154 |
| | 479 | | |
| 2880 | 6mer-2- | RRFTKK | 147 |
| | 480 | | |
| 2881 | 6mer-2- | RQRYKK | 131 |
| | 481 | | |
| 2882 | 6mer-2- | KGQTRR | 154 |
| | 482 | | |
| 2883 | 6mer-2- | RRYLKK | 121 |
| | 483 | | |
| 2884 | 6mer-2- | RWYTKR | 148 |
| | 484 | | |
| 2885 | 6mer-2- | RQIQKR | 148 |
| | 485 | | |
| 2886 | 6mer-2- | KQQSKK | 121 |
| | 486 | | |
| 2887 | 6mer-2- | KSYTKR | 121 |
| | 487 | | |
| 2888 | 6mer-2- | KVYRRK | 146 |
| | 488 | | |
| 2889 | 6mer-2- | RVISKK | 142 |
| | 489 | | |
| 2890 | 6mer-2- | RRYQKK | 145 |
| | 490 | | |
| 2891 | 6mer-2- | KRICKR | 135 |
| | 491 | | |
| 2892 | 6mer-2- | RLIQKK | 148 |
| | 492 | | |
| 2893 | 6mer-2- | KGVRRK | 123 |
| | 493 | | |
| 2894 | 6mer-2- | KGLLRR | 144 |
| | 494 | | |
| 2895 | 6mer-2- | KLLCKK | 121 |
| | 495 | | |
| 2896 | 6mer-2- | RVRYRK | 144 |
| | 496 | | |
| 2897 | 6mer-2- | KSYTRR | 148 |
| | 497 | | |
| 2898 | 6mer-2- | KGLCRR | 127 |
| | 498 | | |
| 2899 | 6mer-2- | RLFTKR | 145 |
| | 499 | | |
| 2900 | 6mer-2- | KRICRR | 146 |
| | 500 | | |
| 2901 | 6mer-2- | KSYSKK | 144 |
| | 501 | | |
| 2902 | 6mer-2- | KSFCKR | 144 |
| | 502 | | |
| 2903 | 6mer-2- | KVQTKK | 154 |
| | 503 | | |
| 2904 | 6mer-2- | RGLTRK | 154 |
| | 504 | | |
| 2905 | 6mer-2- | KRQCKK | 148 |
| | 505 | | |
| 2906 | 6mer-2- | KSLLKK | 135 |
| | 506 | | |
| 2907 | 6mer-2- | RGICKR | 145 |
| | 507 | | |
| 2908 | 6mer-2- | RVFLKK | 121 |
| | 508 | | |
| 2909 | 6mer-2- | RGFYRK | 136 |
| | 509 | | |
| 2910 | 6mer-2- | KRVLKK | 146 |
| | 510 | | |
| 2911 | 6mer-2- | RVFCRR | 126 |
| | 511 | | |
| 2912 | 6mer-2- | RWFTRR | 148 |
| | 512 | | |
| 2913 | 6mer-2- | RRLTRK | 121 |
| | 513 | | |
| 2914 | 6mer-2- | KGLQKK | 124 |
| | 514 | | |
| 2915 | 6mer-2- | RWYCRK | 123 |
| | 515 | | |
| 2916 | 6mer-2- | RQQQKK | 146 |
| | 516 | | |
| 2917 | 6mer-2- | KLRTKK | 153 |
| | 517 | | |
| 2918 | 6mer-2- | KLVTKK | 151 |
| | 518 | | |
| 2919 | 6mer-2- | KQIQRR | 135 |
| | 519 | | |
| 2920 | 6mer-2- | KSYCKR | 144 |
| | 520 | | |
| 2921 | 6mer-2- | KQYTRK | 144 |
| | 521 | | |
| 2922 | 6mer-2- | RVVLRK | 124 |
| | 522 | | |
| 2923 | 6mer-2- | RGRYKR | 146 |
| | 523 | | |
| 2924 | 6mer-2- | RGIQKR | 128 |
| | 524 | | |
| 2925 | 6mer-2- | KWVRKK | 145 |
| | 525 | | |
| 2926 | 6mer-2- | RVLLRK | 144 |
| | 526 | | |
| 2927 | 6mer-2- | RGQTRR | 145 |
| | 527 | | |
| 2928 | 6mer-2- | KGFRKK | 151 |
| | 528 | | |
| 2929 | 6mer-2- | KQQRKR | 124 |
| | 529 | | |
| 2930 | 6mer-2- | RSYSKR | 139 |
| | 530 | | |
| 2931 | 6mer-2- | KVIYKR | 148 |
| | 531 | | |
| 2932 | 6mer-2- | KSITKR | 147 |
| | 532 | | |
| 2933 | 6mer-2- | KRLLKR | 142 |
| | 533 | | |
| 2934 | 6mer-2- | RVQLRR | 139 |
| | 534 | | |
| 2935 | 6mer-2- | KLFCRR | 133 |
| | 535 | | |
| 2936 | 6mer-2- | RWQRKK | 125 |
| | 536 | | |
| 2937 | 6mer-2- | KVLCKR | 153 |
| | 537 | | |
| 2938 | 6mer-2- | KQFCKK | 125 |
| | 538 | | |
| 2939 | 6mer-2- | KWYTKK | 127 |
| | 539 | | |
| 2940 | 6mer-2- | KRLTRR | 142 |
| | 540 | | |
| 2941 | 6mer-2- | KGQCRK | 126 |
| | 541 | | |
| 2942 | 6mer-2- | RQIYRR | 148 |
| | 542 | | |
| 2943 | 6mer-2- | RRQYRR | 144 |
| | 543 | | |
| 2944 | 6mer-2- | KVIQKR | 147 |
| | 544 | | |
| 2945 | 6mer-2- | KLYCRK | 125 |
| | 545 | | |
| 2946 | 6mer-2- | RVFTKK | 127 |
| | 546 | | |
| 2947 | 6mer-2- | RWQCKR | 135 |
| | 547 | | |
| 2948 | 6mer-2- | RLQCRR | 142 |
| | 548 | | |
| 2949 | 6mer-2- | KQLCKK | 142 |
| | 549 | | |
| 2950 | 6mer-2- | RSFTKK | 148 |
| | 550 | | |
| 2951 | 6mer-2- | KWYTKR | 141 |
| | 551 | | |
| 2952 | 6mer-2- | RGLLRR | 148 |
| | 552 | | |
| 2953 | 6mer-2- | RSLQKK | 124 |
| | 553 | | |
| 2954 | 6mer-2- | RWRCRR | 121 |
| | 554 | | |
| 2955 | 6mer-2- | RSVSKK | 154 |
| | 555 | | |
| 2956 | 6mer-2- | RSICKK | 148 |
| | 556 | | |
| 2957 | 6mer-2- | KWVLRK | 123 |
| | 557 | | |
| 2958 | 6mer-2- | KSVCKK | 154 |
| | 558 | | |
| 2959 | 6mer-2- | KGQLRR | 121 |
| | 559 | | |
| 2960 | 6mer-2- | RQYTRR | 153 |
| | 560 | | |
| 2961 | 6mer-2- | RRVLKK | 142 |
| | 561 | | |
| 2962 | 6mer-2- | RQQRKR | 136 |
| | 562 | | |
| 2963 | 6mer-2- | KGYQKR | 131 |
| | 563 | | |
| 2964 | 6mer-2- | KQVYRK | 148 |
| | 564 | | |
| 2965 | 6mer-2- | KSRRRR | 147 |
| | 565 | | |
| 2966 | 6mer-2- | KRLSKK | 139 |
| | 566 | | |
| 2967 | 6mer-2- | KLYYRK | 146 |
| | 567 | | |
| 2968 | 6mer-2- | KGFQKK | 142 |
| | 568 | | |
| 2969 | 6mer-2- | RWQLRK | 135 |
| | 569 | | |
| 2970 | 6mer-2- | RVYYKR | 148 |
| | 570 | | |
| 2971 | 6mer-2- | RGYQRR | 135 |
| | 571 | | |
| 2972 | 6mer-2- | KSQRRK | 148 |
| | 572 | | |
| 2973 | 6mer-2- | KLYLRR | 121 |
| | 573 | | |
| 2974 | 6mer-2- | KGVYRK | 153 |
| | 574 | | |
| 2975 | 6mer-2- | RGYSRK | 139 |
| | 575 | | |
| 2976 | 6mer-2- | KGVSRR | 139 |
| | 576 | | |
| 2977 | 6mer-2- | KRVQRR | 139 |
| | 577 | | |
| 2978 | 6mer-2- | RSVLRK | 135 |
| | 578 | | |
| 2979 | 6mer-2- | RWQYRK | 135 |
| | 579 | | |
| 2980 | 6mer-2- | KWQQRR | 121 |
| | 580 | | |
| 2981 | 6mer-2- | RVQQKR | 139 |
| | 581 | | |
| 2982 | 6mer-2- | RWQTRK | 148 |
| | 582 | | |
| 2983 | 6mer-2- | KSVTKK | 154 |
| | 583 | | |
| 2984 | 6mer-2- | KRLTRK | 148 |
| | 584 | | |
| 2985 | 6mer-2- | RSFRRK | 136 |
| | 585 | | |
| 2986 | 6mer-2- | RWLSRK | 121 |
| | 586 | | |
| 2987 | 6mer-2- | KRISKR | 148 |
| | 587 | | |
| 2988 | 6mer-2- | KWFYKK | 149 |
| | 588 | | |
| 2989 | 6mer-2- | RWQQRK | 153 |
| | 589 | | |
| 2990 | 6mer-2- | KGRLRK | 148 |
| | 590 | | |
| 2991 | 6mer-2- | KGILRR | 146 |
| | 591 | | |
| 2992 | 6mer-2- | RWVLRK | 122 |
| | 592 | | |
| 2993 | 6mer-2- | RSQLKR | 139 |
| | 593 | | |
| 2994 | 6mer-2- | RWYRRR | 139 |
| | 594 | | |
| 2995 | 6mer-2- | KLRCKK | 154 |
| | 595 | | |
| 2996 | 6mer-2- | KGIQKK | 153 |
| | 596 | | |
| 2997 | 6mer-2- | KQFLRK | 154 |
| | 597 | | |
| 2998 | 6mer-2- | KVFRRR | 146 |
| | 598 | | |
| 2999 | 6mer-2- | RRRYRK | 121 |
| | 599 | | |
| 3000 | 6mer-2- | RSQLKK | 139 |
| | 600 | | |

| | |
|---|---|
| Average Binding affinity | 139.09 |

TABLE 13
6mer-2 Bottom sequence

| SEQ ID | Unique | | Binding |
|---|---|---|---|
| NO: | No. | Sequence | affinity |
| 3001 | 6mer-2-601 | KNSHKK | 25 |
| 3002 | 6mer-2-602 | RNTPKR | 24 |
| 3003 | 6mer-2-603 | KFHARR | 32 |
| 3004 | 6mer-2-604 | KEPIRK | 16 |
| 3005 | 6mer-2-605 | KNCGKK | 17 |
| 3006 | 6mer-2-606 | RKPFRR | 15 |
| 3007 | 6mer-2-607 | KKWVKR | 31 |
| 3008 | 6mer-2-608 | RCNHKK | 32 |
| 3009 | 6mer-2-609 | RDSDRR | 24 |
| 3010 | 6mer-2-610 | RKNPKR | 32 |
| 3011 | 6mer-2-611 | RIKMRR | 22 |
| 3012 | 6mer-2-612 | RDCVRK | 17 |
| 3013 | 6mer-2-613 | KAANRR | 18 |
| 3014 | 6mer-2-614 | KAWIRR | 19 |
| 3015 | 6mer-2-615 | KDNGRK | 27 |
| 3016 | 6mer-2-616 | REPHRK | 26 |
| 3017 | 6mer-2-617 | RCNGRR | 32 |
| 3018 | 6mer-2-618 | KHHKKR | 12 |
| 3019 | 6mer-2-619 | RPPDRR | 26 |
| 3020 | 6mer-2-620 | RHTGRR | 33 |
| 3021 | 6mer-2-621 | RHEPKR | 32 |
| 3022 | 6mer-2-622 | RYTNKR | 13 |
| 3023 | 6mer-2-623 | KHAHRR | 13 |
| 3024 | 6mer-2-624 | KPPIRK | 33 |
| 3025 | 6mer-2-625 | RFPDKK | 33 |
| 3026 | 6mer-2-626 | KNSEKK | 33 |
| 3027 | 6mer-2-627 | KKTARR | 33 |
| 3028 | 6mer-2-628 | RKSFKR | 30 |
| 3029 | 6mer-2-629 | RFCWKK | 32 |
| 3030 | 6mer-2-630 | RYAFRR | 27 |
| 3031 | 6mer-2-631 | KYCMKR | 16 |
| 3032 | 6mer-2-632 | KYDIKR | 12 |
| 3033 | 6mer-2-633 | KYAVKR | 17 |
| 3034 | 6mer-2-634 | RYEHRK | 33 |
| 3035 | 6mer-2-635 | KECVRR | 11 |
| 3036 | 6mer-2-636 | KMAPKR | 21 |
| 3037 | 6mer-2-637 | RPPVRK | 32 |
| 3038 | 6mer-2-638 | RCWAKR | 30 |
| 3039 | 6mer-2-639 | KHTVKK | 23 |
| 3040 | 6mer-2-640 | KFKKKR | 21 |
| 3041 | 6mer-2-641 | REEFRR | 12 |
| 3042 | 6mer-2-642 | KTENKK | 16 |
| 3043 | 6mer-2-643 | KANPKK | 12 |
| 3044 | 6mer-2-644 | REPNRR | 12 |
| 3045 | 6mer-2-645 | RIKVKK | 15 |
| 3046 | 6mer-2-646 | RAAPRR | 32 |
| 3047 | 6mer-2-647 | KTEPKR | 19 |
| 3048 | 6mer-2-648 | RYPDRK | 23 |
| 3049 | 6mer-2-649 | KFDVRK | 31 |
| 3050 | 6mer-2-650 | RFKARK | 18 |
| 3051 | 6mer-2-651 | KNADRR | 21 |
| 3052 | 6mer-2-652 | RTTMRK | 16 |
| 3053 | 6mer-2-653 | KIEMKR | 20 |
| 3054 | 6mer-2-654 | RMPEKR | 20 |
| 3055 | 6mer-2-655 | KIWFRR | 31 |
| 3056 | 6mer-2-656 | KADPRR | 11 |
| 3057 | 6mer-2-657 | RKHERK | 32 |
| 3058 | 6mer-2-658 | RYWVKK | 23 |
| 3059 | 6mer-2-659 | KIPNKR | 22 |
| 3060 | 6mer-2-660 | RHKDRK | 16 |
| 3061 | 6mer-2-661 | RMKAKK | 29 |
| 3062 | 6mer-2-662 | KAHPKK | 11 |
| 3063 | 6mer-2-663 | KFAGRR | 24 |
| 3064 | 6mer-2-664 | KCCWKK | 11 |
| 3065 | 6mer-2-665 | KCAERR | 18 |
| 3066 | 6mer-2-666 | KPMDRR | 25 |
| 3067 | 6mer-2-667 | KHDMRR | 25 |
| 3068 | 6mer-2-668 | RFCNKK | 13 |
| 3069 | 6mer-2-669 | KNMWRK | 15 |
| 3070 | 6mer-2-670 | RKWHKR | 33 |
| 3071 | 6mer-2-671 | RDWIRR | 27 |
| 3072 | 6mer-2-672 | KIDDRK | 20 |
| 3073 | 6mer-2-673 | RFCGRK | 23 |
| 3074 | 6mer-2-674 | KKWERK | 26 |
| 3075 | 6mer-2-675 | RMKWRK | 14 |
| 3076 | 6mer-2-676 | KCTAKK | 14 |
| 3077 | 6mer-2-677 | RENWKK | 28 |
| 3078 | 6mer-2-678 | KEWWRR | 32 |
| 3079 | 6mer-2-679 | RYSAKK | 20 |
| 3080 | 6mer-2-680 | KNHGKR | 15 |
| 3081 | 6mer-2-681 | RDTWRR | 33 |
| 3082 | 6mer-2-682 | RNMERR | 33 |
| 3083 | 6mer-2-683 | KTEIRK | 33 |
| 3084 | 6mer-2-684 | RYTMKK | 14 |
| 3085 | 6mer-2-685 | KFHNRK | 15 |
| 3086 | 6mer-2-686 | KTWEKK | 21 |
| 3087 | 6mer-2-687 | KADGRK | 16 |
| 3088 | 6mer-2-688 | RPMFRK | 13 |
| 3089 | 6mer-2-689 | RDKERR | 24 |
| 3090 | 6mer-2-690 | KFTMRK | 13 |
| 3091 | 6mer-2-691 | RHKMRK | 15 |
| 3092 | 6mer-2-692 | KYTNRR | 29 |
| 3093 | 6mer-2-693 | KNTIRR | 16 |
| 3094 | 6mer-2-694 | KDSIRK | 22 |
| 3095 | 6mer-2-695 | KCWWRR | 28 |
| 3096 | 6mer-2-696 | KFTKKK | 20 |
| 3097 | 6mer-2-697 | KCAVKK | 19 |
| 3098 | 6mer-2-698 | KCEDKK | 27 |
| 3099 | 6mer-2-699 | KNAGKR | 23 |
| 3100 | 6mer-2-700 | RPWHKK | 15 |
| 3101 | 6mer-2-701 | KTWAKR | 23 |
| 3102 | 6mer-2-702 | KEMIKR | 18 |
| 3103 | 6mer-2-703 | RTMHKR | 14 |
| 3104 | 6mer-2-704 | KDWHRK | 20 |
| 3105 | 6mer-2-705 | RENFKK | 11 |
| 3106 | 6mer-2-706 | KFTDRK | 23 |
| 3107 | 6mer-2-707 | RTWKRK | 21 |
| 3108 | 6mer-2-708 | RAWVKK | 29 |
| 3109 | 6mer-2-709 | RIWPKR | 31 |
| 3110 | 6mer-2-710 | RNKKKK | 14 |
| 3111 | 6mer-2-711 | KECGRR | 29 |
| 3112 | 6mer-2-712 | KIPHRR | 29 |
| 3113 | 6mer-2-713 | RASWRR | 24 |
| 3114 | 6mer-2-714 | KIDVRK | 30 |
| 3115 | 6mer-2-715 | RATHRK | 32 |
| 3116 | 6mer-2-716 | RTWKKR | 18 |
| 3117 | 6mer-2-717 | KCPGKR | 15 |
| 3118 | 6mer-2-718 | KYTFKR | 12 |
| 3119 | 6mer-2-719 | KIKPRR | 29 |
| 3120 | 6mer-2-720 | RATNRK | 29 |
| 3121 | 6mer-2-721 | RHSKKK | 26 |
| 3122 | 6mer-2-722 | RNEHRR | 21 |
| 3123 | 6mer-2-723 | KEDMKR | 23 |
| 3124 | 6mer-2-724 | KYTMKK | 24 |
| 3125 | 6mer-2-725 | KAHMKK | 25 |
| 3126 | 6mer-2-726 | KHHKKK | 25 |
| 3127 | 6mer-2-727 | RDMIKR | 11 |
| 3128 | 6mer-2-728 | RMTMKK | 23 |
| 3129 | 6mer-2-729 | RCPDKR | 30 |
| 3130 | 6mer-2-730 | RNTHKR | 26 |
| 3131 | 6mer-2-731 | KASWKK | 19 |
| 3132 | 6mer-2-732 | KPTWRK | 24 |
| 3133 | 6mer-2-733 | RTPARK | 29 |
| 3134 | 6mer-2-734 | KHCHRR | 17 |
| 3135 | 6mer-2-735 | KMNAKK | 21 |
| 3136 | 6mer-2-736 | KNNHKK | 29 |
| 3137 | 6mer-2-737 | KDSVRR | 19 |
| 3138 | 6mer-2-738 | KPWFKK | 29 |
| 3139 | 6mer-2-739 | RIHAKK | 17 |
| 3140 | 6mer-2-740 | KIDIRR | 12 |
| 3141 | 6mer-2-741 | KNEKKR | 30 |
| 3142 | 6mer-2-742 | KNNWRR | 32 |
| 3143 | 6mer-2-743 | KHTMKR | 18 |
| 3144 | 6mer-2-744 | KDHPRK | 19 |
| 3145 | 6mer-2-745 | KNTERR | 17 |
| 3146 | 6mer-2-746 | RIKVRK | 26 |
| 3147 | 6mer-2-747 | RANFRR | 29 |
| 3148 | 6mer-2-748 | RFDKKR | 28 |
| 3149 | 6mer-2-749 | KMWKRK | 20 |
| 3150 | 6mer-2-750 | RKCVKR | 29 |
| 3151 | 6mer-2-751 | RPHWKR | 12 |
| 3152 | 6mer-2-752 | KINWRR | 29 |
| 3153 | 6mer-2-753 | RYEHRR | 18 |
| 3154 | 6mer-2-754 | KADGRR | 12 |
| 3155 | 6mer-2-755 | RYNDKK | 18 |
| 3156 | 6mer-2-756 | KPTNRK | 26 |
| 3157 | 6mer-2-757 | RIPNKR | 19 |
| 3158 | 6mer-2-758 | RFSFKK | 18 |
| 3159 | 6mer-2-759 | RFDEKK | 18 |
| 3160 | 6mer-2-760 | KIPVKK | 15 |
| 3161 | 6mer-2-761 | RTEPRK | 29 |
| 3162 | 6mer-2-762 | KFEERK | 24 |
| 3163 | 6mer-2-763 | KMKERR | 19 |
| 3164 | 6mer-2-764 | RNAVKK | 31 |
| 3165 | 6mer-2-765 | KHSPRK | 23 |
| 3166 | 6mer-2-766 | RPTFRK | 23 |
| 3167 | 6mer-2-767 | RICGRK | 13 |
| 3168 | 6mer-2-768 | KYMGRK | 22 |
| 3169 | 6mer-2-769 | RCPFRK | 13 |
| 3170 | 6mer-2-770 | KPNMKK | 24 |
| 3171 | 6mer-2-771 | KITARR | 26 |
| 3172 | 6mer-2-772 | RHPAKK | 15 |
| 3173 | 6mer-2-773 | KPDARR | 11 |
| 3174 | 6mer-2-774 | KFDARK | 17 |
| 3175 | 6mer-2-775 | KMSMKK | 26 |
| 3176 | 6mer-2-776 | RFPWRK | 12 |
| 3177 | 6mer-2-777 | KNDVRR | 31 |
| 3178 | 6mer-2-778 | RNAPKK | 21 |
| 3179 | 6mer-2-779 | KAAHRR | 13 |
| 3180 | 6mer-2-780 | KITIRK | 31 |
| 3181 | 6mer-2-781 | KTMNRK | 28 |
| 3182 | 6mer-2-782 | KPWPKR | 18 |
| 3183 | 6mer-2-783 | RDMVRK | 32 |
| 3184 | 6mer-2-784 | KAEWRK | 26 |
| 3185 | 6mer-2-785 | RHCHRR | 31 |
| 3186 | 6mer-2-786 | RMEMRK | 30 |
| 3187 | 6mer-2-787 | RIWHKK | 19 |
| 3188 | 6mer-2-788 | KKEKKK | 30 |
| 3189 | 6mer-2-789 | KNENRK | 24 |
| 3190 | 6mer-2-790 | RCAGRR | 23 |
| 3191 | 6mer-2-791 | KNMNRK | 27 |
| 3192 | 6mer-2-792 | RAEDKR | 13 |
| 3193 | 6mer-2-793 | RMHKKR | 29 |
| 3194 | 6mer-2-794 | KAEMRR | 19 |
| 3195 | 6mer-2-795 | RTHNKR | 16 |
| 3196 | 6mer-2-796 | RMMARR | 32 |
| 3197 | 6mer-2-797 | RHCIKR | 19 |
| 3198 | 6mer-2-798 | RDTPKK | 17 |
| 3199 | 6mer-2-799 | KCSAKK | 13 |
| 3200 | 6mer-2-800 | RTAWKK | 11 |
| 3201 | 6mer-2-801 | RPNIRK | 24 |
| 3202 | 6mer-2-802 | KETKRR | 24 |
| 3203 | 6mer-2-803 | RNKERK | 18 |
| 3204 | 6mer-2-804 | RNCGKR | 21 |
| 3205 | 6mer-2-805 | RDTMKK | 12 |
| 3206 | 6mer-2-806 | KHCVRK | 30 |
| 3207 | 6mer-2-807 | KIWNRK | 28 |
| 3208 | 6mer-2-808 | RKKFKK | 21 |
| 3209 | 6mer-2-809 | REPWRR | 18 |
| 3210 | 6mer-2-810 | KHAKKK | 18 |
| 3211 | 6mer-2-811 | KAMKRK | 16 |
| 3212 | 6mer-2-812 | KPPEKR | 33 |
| 3213 | 6mer-2-813 | KKMDRR | 29 |
| 3214 | 6mer-2-814 | RYMERK | 28 |
| 3215 | 6mer-2-815 | KICGRK | 30 |
| 3216 | 6mer-2-816 | RKMGKR | 15 |
| 3217 | 6mer-2-817 | KCNDKK | 22 |
| 3218 | 6mer-2-818 | KTPERK | 13 |
| 3219 | 6mer-2-819 | KFSVRR | 23 |
| 3220 | 6mer-2-820 | RPNNKK | 24 |
| 3221 | 6mer-2-821 | RPTMKR | 33 |
| 3222 | 6mer-2-822 | RCTAKK | 13 |
| 3223 | 6mer-2-823 | REDWRK | 25 |
| 3224 | 6mer-2-824 | RITNKR | 26 |
| 3225 | 6mer-2-825 | KIHARK | 11 |
| 3226 | 6mer-2-826 | RNTPRK | 11 |
| 3227 | 6mer-2-827 | KYAEKK | 13 |
| 3228 | 6mer-2-828 | RMKKKR | 32 |
| 3229 | 6mer-2-829 | KKKIRR | 22 |
| 3230 | 6mer-2-830 | RMKFKR | 21 |
| 3231 | 6mer-2-831 | RMTWRK | 29 |
| 3232 | 6mer-2-832 | KYHNRR | 32 |
| 3233 | 6mer-2-833 | RKTWRR | 14 |
| 3234 | 6mer-2-834 | RFWWKR | 28 |
| 3235 | 6mer-2-835 | RHCGKR | 20 |
| 3236 | 6mer-2-836 | KNTMKR | 26 |
| 3237 | 6mer-2-837 | REDFRR | 32 |
| 3238 | 6mer-2-838 | RCTVRK | 13 |
| 3239 | 6mer-2-839 | KNHNRR | 32 |
| 3240 | 6mer-2-840 | KDWDRK | 15 |
| 3241 | 6mer-2-841 | KPNHRK | 33 |
| 3242 | 6mer-2-842 | KPKMRR | 22 |
| 3243 | 6mer-2-843 | KAPDRK | 33 |
| 3244 | 6mer-2-844 | RDPKKK | 22 |
| 3245 | 6mer-2-845 | KMKEKR | 14 |
| 3246 | 6mer-2-846 | RFSFKR | 30 |
| 3247 | 6mer-2-847 | RYCHKR | 22 |
| 3248 | 6mer-2-848 | RMTERK | 29 |
| 3249 | 6mer-2-849 | RNTAKK | 13 |
| 3250 | 6mer-2-850 | KTSMKR | 16 |
| 3251 | 6mer-2-851 | KFWWRR | 19 |
| 3252 | 6mer-2-852 | RNCERR | 28 |
| 3253 | 6mer-2-853 | KHTGRR | 29 |
| 3254 | 6mer-2-854 | RCNWKR | 23 |
| 3255 | 6mer-2-855 | REMIKR | 19 |
| 3256 | 6mer-2-856 | KEPMRR | 14 |
| 3257 | 6mer-2-857 | KHTEKK | 20 |
| 3258 | 6mer-2-858 | KEEHRR | 30 |
| 3259 | 6mer-2-859 | RMDFRK | 21 |
| 3260 | 6mer-2-860 | KPNFRR | 31 |
| 3261 | 6mer-2-861 | KDTDRK | 21 |
| 3262 | 6mer-2-862 | RHTFKK | 29 |
| 3263 | 6mer-2-863 | RKHWRR | 17 |
| 3264 | 6mer-2-864 | RKCAKK | 12 |
| 3265 | 6mer-2-865 | RHCNRK | 16 |
| 3266 | 6mer-2-866 | RDNPKK | 24 |
| 3267 | 6mer-2-867 | KYWEKK | 32 |
| 3268 | 6mer-2-868 | RTPNRR | 30 |
| 3269 | 6mer-2-869 | RHDHKR | 18 |
| 3270 | 6mer-2-870 | KMTEKK | 21 |
| 3271 | 6mer-2-871 | REMPKR | 31 |
| 3272 | 6mer-2-872 | KTHFRK | 28 |
| 3273 | 6mer-2-873 | KNWGRR | 11 |
| 3274 | 6mer-2-874 | KIHFRK | 33 |
| 3275 | 6mer-2-875 | RIDHRK | 13 |
| 3276 | 6mer-2-876 | KEDNKR | 17 |
| 3277 | 6mer-2-877 | KPPERR | 17 |
| 3278 | 6mer-2-878 | KETVRR | 24 |
| 3279 | 6mer-2-879 | RTMDRR | 19 |
| 3280 | 6mer-2-880 | RTHHKK | 12 |
| 3281 | 6mer-2-881 | KDTEKK | 33 |
| 3282 | 6mer-2-882 | RTPAKR | 15 |
| 3283 | 6mer-2-883 | RTNEKR | 22 |
| 3284 | 6mer-2-884 | KMTMKK | 11 |
| 3285 | 6mer-2-885 | KCMVRR | 17 |
| 3286 | 6mer-2-886 | KTWVRR | 13 |
| 3287 | 6mer-2-887 | RCPKKR | 18 |
| 3288 | 6mer-2-888 | RIAKRK | 17 |
| 3289 | 6mer-2-889 | REWDKK | 12 |
| 3290 | 6mer-2-890 | RDNPKR | 30 |
| 3291 | 6mer-2-891 | RTSIRK | 28 |
| 3292 | 6mer-2-892 | KDENRK | 27 |
| 3293 | 6mer-2-893 | REHVRR | 17 |
| 3294 | 6mer-2-894 | RFHWRR | 22 |
| 3295 | 6mer-2-895 | KYMAKK | 28 |
| 3296 | 6mer-2-896 | RTCARR | 30 |
| 3297 | 6mer-2-897 | RPAHKK | 17 |
| 3298 | 6mer-2-898 | KKKDKK | 16 |
| 3299 | 6mer-2-899 | KKMVKR | 13 |
| 3300 | 6mer-2-900 | RFSAKK | 11 |
| 3301 | 6mer-2-901 | RYWDRK | 34 |
| 3302 | 6mer-2-902 | KPDVRK | 26 |
| 3303 | 6mer-2-903 | KKNPKK | 40 |
| 3304 | 6mer-2-904 | KCCFKK | 30 |
| 3305 | 6mer-2-905 | RPKERR | 26 |
| 3306 | 6mer-2-906 | KYCDKK | 40 |
| 3307 | 6mer-2-907 | RTMNRR | 25 |
| 3308 | 6mer-2-908 | KYKKKR | 33 |
| 3309 | 6mer-2-909 | RCNPRR | 42 |
| 3310 | 6mer-2-910 | RHEHRR | 21 |
| 3311 | 6mer-2-911 | KMSGKR | 21 |
| 3312 | 6mer-2-912 | RAPIRR | 27 |
| 3313 | 6mer-2-913 | KFKNRR | 25 |
| 3314 | 6mer-2-914 | KDDIKK | 25 |
| 3315 | 6mer-2-915 | KNCWKR | 29 |
| 3316 | 6mer-2-916 | KTTEKR | 22 |
| 3317 | 6mer-2-917 | RFCWRK | 23 |
| 3318 | 6mer-2-918 | KNWMRK | 35 |
| 3319 | 6mer-2-919 | KAKHKR | 27 |
| 3320 | 6mer-2-920 | RMTIKK | 26 |
| 3321 | 6mer-2-921 | RPKAKK | 22 |
| 3322 | 6mer-2-922 | KDNVRR | 41 |
| 3323 | 6mer-2-923 | RCCAKK | 33 |
| 3324 | 6mer-2-924 | RFDHKK | 28 |
| 3325 | 6mer-2-925 | RASVKR | 23 |
| 3326 | 6mer-2-926 | RPTVKR | 31 |
| 3327 | 6mer-2-927 | RFNPRK | 39 |
| 3328 | 6mer-2-928 | KFCIRR | 28 |
| 3329 | 6mer-2-929 | KNHMRK | 26 |
| 3330 | 6mer-2-930 | RTWIKR | 37 |
| 3331 | 6mer-2-931 | RYCFKR | 29 |
| 3332 | 6mer-2-932 | RIPWRR | 35 |
| 3333 | 6mer-2-933 | RYSMKR | 34 |
| 3334 | 6mer-2-934 | KYKDRR | 26 |
| 3335 | 6mer-2-935 | KKCNKK | 22 |
| 3336 | 6mer-2-936 | KPPAKK | 21 |
| 3337 | 6mer-2-937 | RASHRR | 35 |
| 3338 | 6mer-2-938 | RIEHKR | 40 |
| 3339 | 6mer-2-939 | KKCARR | 22 |
| 3340 | 6mer-2-940 | RNENKK | 41 |
| 3341 | 6mer-2-941 | RDEDKR | 33 |
| 3342 | 6mer-2-942 | KTDKRK | 22 |
| 3343 | 6mer-2-943 | KIDHRR | 41 |
| 3344 | 6mer-2-944 | KPEDKK | 35 |
| 3345 | 6mer-2-945 | KKCERK | 42 |
| 3346 | 6mer-2-946 | KPCEKK | 21 |
| 3347 | 6mer-2-947 | KTNWRK | 41 |
| 3348 | 6mer-2-948 | RPPFRR | 28 |
| 3349 | 6mer-2-949 | RPNARR | 39 |
| 3350 | 6mer-2-950 | KYNKRR | 26 |
| 3351 | 6mer-2-951 | RADEKK | 42 |
| 3352 | 6mer-2-952 | KYWGRR | 24 |
| 3353 | 6mer-2-953 | KESVKK | 25 |
| 3354 | 6mer-2-954 | KCTIRK | 32 |
| 3355 | 6mer-2-955 | RMPERR | 29 |
| 3356 | 6mer-2-956 | KFCWRR | 28 |
| 3357 | 6mer-2-957 | RDTHRR | 40 |
| 3358 | 6mer-2-958 | KFKARK | 28 |
| 3359 | 6mer-2-959 | RTNARK | 35 |
| 3360 | 6mer-2-960 | RDCVKR | 29 |
| 3361 | 6mer-2-961 | KNTKKR | 21 |
| 3362 | 6mer-2-962 | KKSNRK | 30 |
| 3363 | 6mer-2-963 | KAKHRR | 37 |
| 3364 | 6mer-2-964 | KCEDRK | 41 |
| 3365 | 6mer-2-965 | KPWFKR | 36 |
| 3366 | 6mer-2-966 | KEDAKR | 41 |
| 3367 | 6mer-2-967 | RTSNKK | 35 |
| 3368 | 6mer-2-968 | RHWEKK | 39 |
| 3369 | 6mer-2-969 | KATHKR | 33 |
| 3370 | 6mer-2-970 | KDDVRR | 27 |
| 3371 | 6mer-2-971 | KEMFRK | 29 |
| 3372 | 6mer-2-972 | KAMFRR | 38 |
| 3373 | 6mer-2-973 | KCPIKK | 41 |
| 3374 | 6mer-2-974 | RFDDRR | 38 |
| 3375 | 6mer-2-975 | KKTMKK | 38 |
| 3376 | 6mer-2-976 | RTTGKK | 26 |
| 3377 | 6mer-2-977 | REMKRK | 30 |
| 3378 | 6mer-2-978 | KEPHRR | 28 |
| 3379 | 6mer-2-979 | KKAFKK | 22 |
| 3380 | 6mer-2-980 | KESGKR | 34 |
| 3381 | 6mer-2-981 | RCEIRK | 32 |
| 3382 | 6mer-2-982 | RMHAKK | 38 |
| 3383 | 6mer-2-983 | RTWHRR | 37 |
| 3384 | 6mer-2-984 | KDMWKK | 43 |
| 3385 | 6mer-2-985 | REMNKR | 34 |
| 3386 | 6mer-2-986 | KNWARR | 27 |
| 3387 | 6mer-2-987 | RCHPKK | 22 |
| 3388 | 6mer-2-988 | KMCEKK | 41 |
| 3389 | 6mer-2-989 | KAHNKR | 22 |
| 3390 | 6mer-2-990 | RKKMKR | 41 |
| 3391 | 6mer-2-991 | KCHFRR | 30 |
| 3392 | 6mer-2-992 | RMHFRR | 33 |
| 3393 | 6mer-2-993 | RHDVKK | 29 |
| 3394 | 6mer-2-994 | KYCIKK | 41 |
| 3395 | 6mer-2-995 | KFWEKK | 38 |
| 3396 | 6mer-2-996 | RHDARK | 40 |
| 3397 | 6mer-2-997 | KISFKK | 30 |
| 3398 | 6mer-2-998 | KEMWKK | 43 |
| 3399 | 6mer-2-999 | RATIKR | 31 |
| 3400 | 6mer-2-1000 | KCHDKK | 41 |
| 3401 | 6mer-2-1001 | RKKFKK | 37 |
| 3402 | 6mer-2-1002 | RCNDKR | 42 |
| 3403 | 6mer-2-1003 | KPEWKR | 42 |
| 3404 | 6mer-2-1004 | RDTHKR | 38 |
| 3405 | 6mer-2-1005 | RFKARR | 23 |
| 3406 | 6mer-2-1006 | RATMRR | 30 |
| 3407 | 6mer-2-1007 | RHTNKK | 42 |
| 3408 | 6mer-2-1008 | RAWKKR | 38 |
| 3409 | 6mer-2-1009 | KINPRK | 34 |
| 3410 | 6mer-2-1010 | RANHKK | 36 |
| 3411 | 6mer-2-1011 | RAEFRR | 22 |
| 3412 | 6mer-2-1012 | KASAKK | 30 |
| 3413 | 6mer-2-1013 | KPPDKR | 23 |
| 3414 | 6mer-2-1014 | RPPMRR | 34 |
| 3415 | 6mer-2-1015 | RDEMKR | 29 |
| 3416 | 6mer-2-1016 | RNEEKR | 41 |
| 3417 | 6mer-2-1017 | RAPVRR | 40 |
| 3418 | 6mer-2-1018 | RPTKKK | 24 |
| 3419 | 6mer-2-1019 | RNTWKK | 23 |
| 3420 | 6mer-2-1020 | KHDKKR | 21 |
| 3421 | 6mer-2-1021 | RYTPKR | 39 |
| 3422 | 6mer-2-1022 | KCNPRR | 22 |
| 3423 | 6mer-2-1023 | KAEFKR | 26 |
| 3424 | 6mer-2-1024 | RFHNKR | 37 |
| 3425 | 6mer-2-1025 | RCSHRR | 39 |
| 3426 | 6mer-2-1026 | KENHRK | 33 |
| 3427 | 6mer-2-1027 | KTPVKK | 32 |
| 3428 | 6mer-2-1028 | KPEHRR | 41 |
| 3429 | 6mer-2-1029 | KEEFKK | 40 |
| 3430 | 6mer-2-1030 | RAPFKK | 28 |
| 3431 | 6mer-2-1031 | RAWERK | 33 |
| 3432 | 6mer-2-1032 | KETVKR | 31 |
| 3433 | 6mer-2-1033 | KMDEKK | 28 |
| 3434 | 6mer-2-1034 | KHSWRR | 38 |
| 3435 | 6mer-2-1035 | RPPVKK | 39 |
| 3436 | 6mer-2-1036 | KAKNKR | 25 |
| 3437 | 6mer-2-1037 | KIHWKK | 26 |
| 3438 | 6mer-2-1038 | KHWERK | 33 |
| 3439 | 6mer-2-1039 | RNHFRK | 26 |
| 3440 | 6mer-2-1040 | KYAWRK | 36 |
| 3441 | 6mer-2-1041 | RACDKR | 22 |
| 3442 | 6mer-2-1042 | KKMFRK | 36 |
| 3443 | 6mer-2-1043 | RDKGKK | 40 |
| 3444 | 6mer-2-1044 | KHTDKK | 41 |
| 3445 | 6mer-2-1045 | RHAHRR | 41 |
| 3446 | 6mer-2-1046 | RNSEKR | 39 |
| 3447 | 6mer-2-1047 | RHDDKR | 28 |
| 3448 | 6mer-2-1048 | RIHNRK | 22 |
| 3449 | 6mer-2-1049 | KMSPRR | 26 |
| 3450 | 6mer-2-1050 | KPPPRK | 26 |
| 3451 | 6mer-2-1051 | RKHMRR | 24 |
| 3452 | 6mer-2-1052 | KAPARK | 23 |
| 3453 | 6mer-2-1053 | KEMGKK | 34 |
| 3454 | 6mer-2-1054 | KKNKKR | 43 |
| 3455 | 6mer-2-1055 | KPDFKR | 30 |
| 3456 | 6mer-2-1056 | RNDERK | 22 |
| 3457 | 6mer-2-1057 | RKKKKK | 25 |
| 3458 | 6mer-2-1058 | RMPWKK | 24 |
| 3459 | 6mer-2-1059 | RFADRR | 35 |
| 3460 | 6mer-2-1060 | KTNERK | 35 |
| 3461 | 6mer-2-1061 | KPPIKK | 38 |
| 3462 | 6mer-2-1062 | KYNIRK | 35 |
| 3463 | 6mer-2-1063 | RFNVRK | 24 |
| 3464 | 6mer-2-1064 | RCMKRR | 39 |
| 3465 | 6mer-2-1065 | RIANRK | 27 |
| 3466 | 6mer-2-1066 | KPEHKR | 29 |
| 3467 | 6mer-2-1067 | RDEIRK | 29 |
| 3468 | 6mer-2-1068 | RIHVKK | 26 |
| 3469 | 6mer-2-1069 | KHDMKK | 36 |
| 3470 | 6mer-2-1070 | RPHVRR | 31 |
| 3471 | 6mer-2-1071 | RTTWRK | 25 |
| 3472 | 6mer-2-1072 | KPHWKR | 29 |
| 3473 | 6mer-2-1073 | KYSWRK | 24 |
| 3474 | 6mer-2-1074 | RPMGRK | 33 |
| 3475 | 6mer-2-1075 | RHMERK | 31 |
| 3476 | 6mer-2-1076 | RYCIRR | 34 |
| 3477 | 6mer-2-1077 | KMTIKK | 34 |
| 3478 | 6mer-2-1078 | KDTFRR | 40 |
| 3479 | 6mer-2-1079 | KCNEKK | 40 |
| 3480 | 6mer-2-1080 | RKHKKK | 23 |
| 3481 | 6mer-2-1081 | KYKMRR | 32 |
| 3482 | 6mer-2-1082 | KYTERR | 31 |
| 3483 | 6mer-2-1083 | KTKGKR | 39 |
| 3484 | 6mer-2-1084 | REKPRK | 29 |
| 3485 | 6mer-2-1085 | RPEIRK | 42 |
| 3486 | 6mer-2-1086 | KNDWRK | 21 |
| 3487 | 6mer-2-1087 | KEEMRR | 21 |
| 3488 | 6mer-2-1088 | RPCEKK | 39 |
| 3489 | 6mer-2-1089 | RKTDRR | 43 |
| 3490 | 6mer-2-1090 | KEMHKK | 33 |
| 3491 | 6mer-2-1091 | RFDNKR | 31 |
| 3492 | 6mer-2-1092 | RAKFRR | 21 |
| 3493 | 6mer-2-1093 | KTTDKK | 43 |
| 3494 | 6mer-2-1094 | KAWERK | 43 |
| 3495 | 6mer-2-1095 | KYSMRR | 39 |
| 3496 | 6mer-2-1096 | RANVKR | 39 |
| 3497 | 6mer-2-1097 | RFWEKK | 23 |
| 3498 | 6mer-2-1098 | KHPKRR | 28 |
| 3499 | 6mer-2-1099 | REDWRR | 21 |
| 3500 | 6mer-2-1100 | RTAPKK | 24 |
| 3501 | 6mer-2-1101 | RTKMRR | 38 |
| 3502 | 6mer-2-1102 | KHKGKR | 32 |
| 3503 | 6mer-2-1103 | RDAWRK | 42 |
| 3504 | 6mer-2-1104 | RYTKKR | 38 |
| 3505 | 6mer-2-1105 | RNNAKK | 28 |
| 3506 | 6mer-2-1106 | KDKVKR | 28 |
| 3507 | 6mer-2-1107 | RAHERK | 29 |
| 3508 | 6mer-2-1108 | KKKVRR | 36 |
| 3509 | 6mer-2-1109 | KEDMRK | 26 |
| 3510 | 6mer-2-1110 | RMTKKK | 37 |
| 3511 | 6mer-2-1111 | REDEKK | 23 |
| 3512 | 6mer-2-1112 | RASWRK | 26 |
| 3513 | 6mer-2-1113 | KPNFRK | 43 |
| 3514 | 6mer-2-1114 | RKKFRK | 34 |
| 3515 | 6mer-2-1115 | KYSPRK | 39 |
| 3516 | 6mer-2-1116 | KMEVKK | 31 |
| 3517 | 6mer-2-1117 | RMHVKR | 21 |
| 3518 | 6mer-2-1118 | RFDGRR | 42 |
| 3519 | 6mer-2-1119 | KCTVRK | 39 |
| 3520 | 6mer-2-1120 | RDMMKK | 28 |
| 3521 | 6mer-2-1121 | KPSKRR | 21 |
| 3522 | 6mer-2-1122 | RCNFKK | 22 |
| 3523 | 6mer-2-1123 | RITARR | 36 |
| 3524 | 6mer-2-1124 | RKTWRK | 39 |
| 3525 | 6mer-2-1125 | RDAFKK | 30 |
| 3526 | 6mer-2-1126 | RHEVRR | 23 |
| 3527 | 6mer-2-1127 | KAAEKK | 42 |
| 3528 | 6mer-2-1128 | KNCMRK | 36 |
| 3529 | 6mer-2-1129 | RITGKR | 42 |
| 3530 | 6mer-2-1130 | RHSFRK | 29 |
| 3531 | 6mer-2-1131 | RTNAKR | 26 |
| 3532 | 6mer-2-1132 | RPWERR | 32 |
| 3533 | 6mer-2-1133 | KMKMKK | 22 |
| 3534 | 6mer-2-1134 | KYENRK | 30 |
| 3535 | 6mer-2-1135 | RANWKR | 29 |
| 3536 | 6mer-2-1136 | KMKKKR | 36 |
| 3537 | 6mer-2-1137 | RTDFKR | 22 |
| 3538 | 6mer-2-1138 | KAHFKK | 42 |
| 3539 | 6mer-2-1139 | KAKAKK | 39 |
| 3540 | 6mer-2-1140 | KMNKKR | 29 |
| 3541 | 6mer-2-1141 | KCTGKR | 32 |
| 3542 | 6mer-2-1142 | KKAMKR | 30 |
| 3543 | 6mer-2-1143 | KACIKK | 42 |
| 3544 | 6mer-2-1144 | RFEDRK | 39 |
| 3545 | 6mer-2-1145 | RIKNRR | 23 |
| 3546 | 6mer-2-1146 | REWGRK | 32 |
| 3547 | 6mer-2-1147 | KFMKKK | 35 |
| 3548 | 6mer-2-1148 | KEKGKR | 34 |
| 3549 | 6mer-2-1149 | KIDFRR | 21 |
| 3550 | 6mer-2-1150 | KTDVKK | 42 |
| 3551 | 6mer-2-1151 | RYPVRK | 43 |
| 3552 | 6mer-2-1152 | RNWAKK | 37 |
| 3553 | 6mer-2-1153 | KHKPKR | 27 |
| 3554 | 6mer-2-1154 | RYEARR | 30 |
| 3555 | 6mer-2-1155 | RNTNRK | 25 |
| 3556 | 6mer-2-1156 | KMNARR | 35 |
| 3557 | 6mer-2-1157 | RNTDRK | 37 |
| 3558 | 6mer-2-1158 | RDNIRK | 37 |
| 3559 | 6mer-2-1159 | KDMGKR | 40 |
| 3560 | 6mer-2-1160 | RITVKK | 23 |
| 3561 | 6mer-2-1161 | RHSFKK | 27 |
| 3562 | 6mer-2-1162 | KMSERR | 34 |
| 3563 | 6mer-2-1163 | KCHFKK | 37 |
| 3564 | 6mer-2-1164 | RYNHKR | 33 |
| 3565 | 6mer-2-1165 | RIKAKK | 30 |
| 3566 | 6mer-2-1166 | KCSIKK | 26 |
| 3567 | 6mer-2-1167 | RCAPKR | 27 |
| 3568 | 6mer-2-1168 | KMKPKK | 41 |
| 3569 | 6mer-2-1169 | KICERK | 21 |
| 3570 | 6mer-2-1170 | KFTIRR | 25 |
| 3571 | 6mer-2-1171 | KMPARR | 40 |
| 3572 | 6mer-2-1172 | KNCERR | 36 |
| 3573 | 6mer-2-1173 | KCCNKK | 38 |
| 3574 | 6mer-2-1174 | RCEPRK | 21 |
| 3575 | 6mer-2-1175 | RYSKRR | 34 |
| 3576 | 6mer-2-1176 | RYTEKK | 43 |
| 3577 | 6mer-2-1177 | RASEKR | 41 |
| 3578 | 6mer-2-1178 | KTTVRK | 30 |
| 3579 | 6mer-2-1179 | KACVKK | 34 |
| 3580 | 6mer-2-1180 | RAANRR | 34 |
| 3581 | 6mer-2-1181 | KACWKR | 32 |
| 3582 | 6mer-2-1182 | RHNDKR | 30 |
| 3583 | 6mer-2-1183 | RENNRK | 35 |
| 3584 | 6mer-2-1184 | KFWVRR | 22 |
| 3585 | 6mer-2-1185 | RIDAKK | 42 |
| 3586 | 6mer-2-1186 | KEKFRR | 27 |
| 3587 | 6mer-2-1187 | RTADRK | 36 |
| 3588 | 6mer-2-1188 | RAPARR | 22 |
| 3589 | 6mer-2-1189 | KTAPKK | 40 |
| 3590 | 6mer-2-1190 | KACIRR | 32 |
| 3591 | 6mer-2-1191 | KKADRK | 35 |
| 3592 | 6mer-2-1192 | KHKNKR | 40 |
| 3593 | 6mer-2-1193 | REKIRR | 43 |
| 3594 | 6mer-2-1194 | KYCDRK | 35 |
| 3595 | 6mer-2-1195 | KMTERK | 25 |
| 3596 | 6mer-2-1196 | RESKKR | 39 |
| 3597 | 6mer-2-1197 | KNCIKK | 23 |
| 3598 | 6mer-2-1198 | RMSHRR | 27 |
| 3599 | 6mer-2-1199 | RCTNKR | 27 |
| 3600 | 6mer-2-1200 | RHHNRR | 30 |

| | |
|---|---|
| Average Binding affinity | 27.07 |

[0141] According to Table 8, the binding affinity for acetylcholine receptor of SEQ ID NO: 73,5mer-73, with the sequence RRQRR, was significantly higher than other 5mers (binding affinity of 179). Consequently, extended 6mer sequences XRRQRR and RRQRRX were created based on SEQ ID NO: 73 to check the binding affinity for acetylcholine receptor, and the results are presented as relative value to the RRQRR sequence in Table 14.

TABLE 14

| XRRQRR-6mer | | | RRQRRX-6mer | | |
|---|---|---|---|---|---|
| SEQ | | | SEQ | | |
| ID | Se- | Binding | ID | Se- | Binding |
| NO: | quence | affinity | NO: | quence | affinity |
| 3601 | GRRQRR | 132 | 3621 | RRQRRG | 109 |
| 3602 | ARRQRR | 129 | 3622 | RRQRRA | 113 |
| 3603 | VRRQRR | 135 | 3623 | RRQRRV | 120 |
| 3604 | CRRQRR | 123 | 3624 | RRQRRC | 126 |
| 3605 | PRRQRR | 133 | 3625 | RRQRRP | 137 |
| 3606 | LRRQRR | 144 | 3626 | RRQRRL | 141 |
| 3607 | IRRQRR | 121 | 3627 | RRQRRI | 133 |
| 3608 | MRRQRR | 119 | 3628 | RRQRRM | 122 |
| 3609 | WRRQRR | 138 | 3629 | RRQRRW | 129 |
| 3610 | FRRQRR | 143 | 3630 | RRQRRF | 132 |
| 3611 | SRRQRR | 121 | 3631 | RRQRRS | 113 |
| 3612 | TRRQRR | 103 | 3632 | RRQRRT | 117 |
| 3613 | YRRQRR | 130 | 3633 | RRQRRY | 105 |
| 3614 | NRRQRR | 113 | 3634 | RRQRRN | 109 |
| 3615 | QRRQRR | 105 | 3635 | RRQRRQ | 101 |
| 3616 | KRRQRR | 173 | 3636 | RRQRRK | 175 |
| 3617 | RRRQRR | 189 | 3637 | RRQRRR | 192 |
| 3618 | HRRQRR | 164 | 3638 | RRQRRH | 158 |
| 3619 | DRRQRR | 163 | 3639 | RRQRRD | 65 |
| 3620 | ERRQRR | 147 | 3640 | RRQRRE | 37 |

[0142] As shown in Table 14, most sequences of XRRQRR and RRQRRX, which are both extended sequences of RRQRR, had high binding affinity for acetylcholine receptor.

[0143] Furthermore, the binding affinity of SEQ ID NO: 1410, 6mer-1-210, with the sequence RRGVRR for the acetylcholine receptor was very high compared to other 6mers (binding affinity of 184). Therefore, the extended 7mer sequences XRRGVRR and RRGVRRX were created based on SEQ ID NO: 1410 to check binding affinity for acetylcholine receptor, and the results are presented as values relative to the RRGVRR sequence in Table 15.

TABLE 15

| XRRGVRR-7mer | | | RRGVRRX-7mer | | |
|---|---|---|---|---|---|
| SEQ | | | SEQ | | |
| ID | Se- | Binding | ID | Se- | Binding |
| NO: | quence | affinity | NO: | quence | affinity |
| 3641 | GRRGVRR | 137 | 3661 | RRGVRRG | 105 |
| 3642 | ARRGVRR | 134 | 3662 | RRGVRRA | 118 |
| 3643 | VRRGVRR | 140 | 3663 | RRGVRRV | 149 |
| 3644 | CRRGVRR | 128 | 3664 | RRGVRRC | 131 |
| 3645 | PRRGVRR | 138 | 3665 | RRGVRRP | 142 |
| 3646 | LRRGVRR | 149 | 3666 | RRGVRRL | 146 |
| 3647 | IRRGVRR | 126 | 3667 | RRGVRRI | 138 |
| 3648 | MRRGVRR | 124 | 3668 | RRGVRRM | 127 |
| 3649 | WRRGVRR | 134 | 3669 | RRGVRRW | 134 |
| 3650 | FRRGVRR | 139 | 3670 | RRGVRRF | 137 |
| 3651 | SRRGVRR | 117 | 3671 | RRGVRRS | 118 |
| 3652 | TRRGVRR | 105 | 3672 | RRGVRRT | 113 |
| 3653 | YRRGVRR | 145 | 3673 | RRGVRRY | 101 |
| 3654 | NRRGVRR | 109 | 3674 | RRGVRRN | 105 |
| 3655 | QRRGVRR | 101 | 3675 | RRGVRRQ | 105 |
| 3656 | KRRGVRR | 169 | 3676 | RRGVRRK | 171 |
| 3657 | RRRGVRR | 185 | 3677 | RRGVRRR | 188 |
| 3658 | HRRGVRR | 160 | 3678 | RRGVRRH | 154 |
| 3659 | DRRGVRR | 159 | 3679 | RRGVRRD | 61 |
| 3660 | ERRGVRR | 43 | 3680 | RRGVRRE | 33 |

[0144] As shown in Table 15, most sequences of XRRGVRR and RRGVRRX, which are both extended sequences of RRGVRR, had very high binding affinity for acetylcholine receptor.

### Example 7. Comparison of Binding Affinity Between Top 2 Peptides in Each Library and Positive Control

[0145] Representative peptides identified in Example 6, two in each library, including 5mers (73, 311) and 6mers-1 (43, 210) and 6mers-2 (136, 233), were compared with the pre-optimized 6mer, 5mer-ND, and Synake. The results are presented in Table 16 and FIG. 8. As can be seen in Table 16 and FIG. 8, the optimized shortened peptides of 5mer and 6mer for XYZ in Example 6 exhibited higher binding affinity for acetylcholine receptor than the pre-optimized ESP-2 short peptides as well as Synake.

[0146] Of the optimized shortened peptides, 6mer-1-43 peptide was measured for binding affinity, and the measurement is shown in FIG. 9. The affinity of 6mer-1-43 peptide according to the present disclosure for acetylcholine receptor was 609 nM.

TABLE 16

| | | | Binding |
|---|---|---|---|
| | | Se- | affinity |
| No. | Name | quence | (RU) |
| 1 | 5mer-ND | KSLLR | 23 |
| 2 | Synake | — | 14 |
| 3 | 5mer-73 | RRQRR | 179 |
| 4 | 5mer-311 | RSYSR | 167 |
| 5 | Spep 6mer | RKSLLR | 35 |
| 6 | 6mer-1-43 | RKRIRR | 548 |
| 7 | 6mer-1-210 | RRGVRR | 184 |
| 8 | 6mer-2-136 | RWRYKR | 194 |
| 9 | 6mer-2-233 | KWRQKR | 190 |

### Example 8. Acetylcholine Receptor Inhibition by Six Peptides with High Binding Affinity

[0147] The 5mer (73, 311), 6mer-1 (43, 210), and 6mer-2 (136, 233) peptides, which were confirmed to have excellent binding affinity for AchR in Example 5, were examined for inhibitory effects on AchR action.

[0148] Acetylcholine receptor-overexpressing TE671 cells were cultured at 37° C. in DMEM medium supplemented with 10% FBS and 1% P/S under 5% CO2. After the TE671 cells were sufficiently grown for 4 days, the cells were detached using trypsin and the cell culture was plated in an amount of 1 ml at a density of 2×104 cells/well into 12-well cell culture plate with an 18 mm cover-slip lined therein, and cultured for 4 days.

[0149] The cover-slip on which the cells had grown was transferred to a fresh 12-well cell culture plate, and 997 μl of HBSS buffer and 3 μl of Fura-2-AM were added and gently mixed, followed by incubation at 37° C., 5% CO2 for 15 minutes. After incubation, the remaining Fura-2-AM was removed by washing 3-4 times with 1 ml of HBSS buffer, and an additional 1 ml was added. The cover-slip with the grown cells was placed in a chamber, and 500 μl of HBSS buffer was dispensed. The final concentration of nicotine was adjusted to 400 UM to observe the calcium imaging reaction. Then, while keeping the nicotine concentration fixed, the concentration of the sample was adjusted to find the inhibiting concentration. Synake was used as a control and the results are presented in FIGS. 10-13.

[0150] As shown in FIGS. 10-13, Synake inhibited acetylcholine receptors at 500 μM, while the precursor peptide 11mer did at 5 μM. Meanwhile, the optimized shortened peptides according to the present disclosure, 5mer (73, 311), 6mer-1 (43, 210), and 6mer-2 (136, 233), were found to exhibit inhibition at 10 μM. These newly discovered 6mer peptides showed similar inhibitory ability to the precursor 11mer peptide while being approximately 100 times more potent on average than Synake, and the 5mer peptides showed about 33 times more potent inhibitory ability.

### Example 9. Assay for Acetylcholine Receptor Inhibition by Modifying Peptide Terminal

[0151] The terminals of the optimized shortened peptides according to the present disclosure were modified with palmitate to examine inhibitory ability against the acetylcholine receptor. The inhibitory ability of the Palmitate-6mer-1-43 and Palmitate-5mer-73 peptides on the acetylcholine receptor was examined in the same manner as in Example 6. As a result, the peptides exhibited 100% inhibition at 1 μM, and the measurements are presented in FIGS. 14 and 15. Additionally, the inhibitory ability (IC50) of the optimized short peptides and the palmitate-modified peptides according to the present disclosure against acetylcholine receptor was compared with Synake and is depicted in FIG. 16. As shown in FIGS. 14 to 16, when the termini of the optimized shortened peptides were modified with palmitate, there was a significant increase in inhibitory ability on the acetylcholine receptor compared to the unmodified shortened peptides.

### Example 10. Assay for Cytotoxicity of Optimized Short Peptides

[0152] The optimized shortened peptides according to the present disclosure were assayed for cytotoxicity. In this regard, the cytotoxicity was assessed by the MTT [(3-(4,5-dimethylthiazol-2-yl)-2,5-diphenyltetrazolium bromide] method using dermal fibroblast cells isolated from human skin. The pre-cultured cells were seeded at a concentration of 1×105 cells/mL in a 24-well plate and cultured for 18 hours. Subsequently, the medium was removed and the diluted sample was added to the medium free of FBS and incubated for 24 hours, after which the medium was removed and MTT solution was added at a concentration of 1 μg/mL and reacted for 3 hours. Unreacted MTT was removed, and DMSO 100 μL was added to dissolve the formed formazan, and the absorbance at 540 nm was read on an ELISA reader.

[0153] As shown in FIG. 17, the cytotoxicity levels of the 6mer-1-43 (6mer peptide), 5mer-73 (5mer peptide), Pal-6mer-1-43, AND Pal-5mer-73 peptides on dermal fibroblast cells were measured using the MTT method, and all the peptides were evaluated as non-toxic at concentrations ranging from 100 nM to 100 μM.

### Example 11. Analysis of Skin Permeability According to Peptide Length

[0154] Using the Franz diffusion cell system, comparison was made of skin permeability between the precursor peptide, 11mer, and the optimized shortened peptides of the present disclosure.

[0155] To the receptor chamber of the Franz diffusion cell system was added 5 ml of PBS (pH 7.4 containing 0.05% polysorbate 80), followed by insertion of one or two sheets of cellulose acetate membrane, which acts as artificial skin, between the receptor and donor chambers. After fixation of the chambers, the existing 11mer and optimized 5mer-73 (RRQRR) peptides were added to the donor chamber of the Franz cell. The receptor chamber was controlled to have the condition of 37° C. and 600 rpm, and samples were collected every 0.5, 1, 2, 4, 8, 12, 18, and 24 hours in 500 μl quantities to measure the amount of drug that permeated through the skin over time using HPLC, and the results were displayed in FIG. 18. As seen in FIG. 18, the skin permeability of the optimized short peptide, 5mer, according to the present disclosure was confirmed to be 66.87% after 8 hours, whereas the 11mer did not permeate at all.

[0156] As above, the optimized shortened 5mer peptides of the present disclosure showed a similar acetylcholine receptor inhibitory activity to the 11mer peptide, which had shown excellent inhibitory effects on acetylcholine receptors in previous research, but dramatically increased in skin permeability and significantly decreased in production cost due to its shortened length to the half of the original length.

### Example 12. Clinical Evaluation of Efficacy of Peptide Cosmetic Formulation on Eye Wrinkles

[0157] The clinical efficacy of the optimized shortened peptides according to the present disclosure on eye skin wrinkles was evaluated. Test products containing the optimized shortened peptides of the present disclosure and a control group were manufactured as described in Table 17, and human application tests were conducted. Twenty-one participants who met the selection criteria and did not fall under any exclusion criteria were recruited, and after one withdrew their consent to participate, the final number of participants was 20. All measurements were taken after the participants had rested for at least 30 minutes under constant temperature and humidity conditions (22±2° C., 50±10% RH) without direct sunlight or air movement. Selected participants visited the clinical institution before using the product (week 0) to measure eye skin texture (wrinkles) and conduct demographic surveys. They applied the test product twice daily (morning and evening) for 6 weeks and revisited the clinical institution at weeks 3 and 6 after using the product for evaluation under the same conditions as week 0.

TABLE 17

| | | | [symbol] | [symbol] |
|---|---|---|---|---|
| NO | TRADE NAME | INCI NAME | WT % | WT % |
| 1 | Distilled water1 | WATER | 50~80 | 50~80 |
| 2 | Adenosine | Adenosine | 0.01~0.1 | 0.01~0.1 |
| 3 | PANTHENOL | PANTHENOL | 0.1~1.0 | 0.1~1.0 |
| 4 | KMO-6 | 1,2-Hexandiol | 1~5 | 1~5 |
| 5 | 1,3 BG | BUTYLENE GLYCOL | 2~8 | 2~8 |
| 6 | DPG-FC | DIPROPYLENE GLYCOL | 2~8 | 2~8 |
| 7 | GLYCERINE | GLYCERIN | 3~15 | 3~15 |
| 8 | Viscomate NP 700 | SODIUM POLYACRYA\|LATE | 0.01~0.1 | 0.01~0.1 |
| 9 | KELTROL F | XANTHAN GUM | 0.1~1.0 | 0.1~1.0 |
| 10 | SIMULGEL NS | Hydroxyethyl Acrylate / Sodium | 1~5 | 1~5 |
| 11 | Na-HYALURONATE | Sodium Hyaluronate | 0.5~5.0 | 0.5~5.0 |
| 12 | Glucan Real | Beta-Glucan | 0.5~5.0 | 0.5~5.0 |
| 13 | Peptide | — | Suitable amount | — |
| 14 | Perfume | Fragrance | Suitable amount | Suitable amount |

[0158] The evaluation items included the overall size of wrinkle depth, and maximum depth, which were measured and analyzed for eye skin wrinkles using ANTERA 3D® CS (Miravex, Ireland), and the results were compared to those at week 0 and displayed in Table 18 and FIG. 19. The control group did not show any significant differences in all evaluation items.

TABLE 18

| Item | Week | Mean ± SD. | Change(%) | p-value |
|---|---|---|---|---|
| Overall size | 0 | 21.536 ± 1.5225 | — | — |
| (AU) | 3 | 17.181 ± 1.0693 | ▾ 19.1 | <0.001*** |
| | 6 | 14.600 ± 1.0447 | ▾ 31.5 | <0.001*** |
| Depth | 0 | 0.075 ± 0.0048 | — | — |
| (mm) | 3 | 0.058 ± 0.0033 | ▾ 21.0 | <0.001*** |
| | 6 | 0.051 ± 0.0027 | ▾ 30.1 | <0.001*** |
| Maximum depth | 0 | 0.130 ± 0.0059 | — | — |
| (mm) | 3 | 0.111 ± 0.0066 | ▾ 14.2 | <0.004*** |
| | 6 | 0.092 ± 0.0048 | ▾ 27.9 | <0.001*** |

[0159] As shown in Table 18 and FIG. 19, the overall size of eye wrinkles decreased by 19.1% at week 3 (p<0.001) and 31.5% at week 6 (p<0.001) compared to before product use. Depth decreased by 21.0% at week 3 (p<0.001) and 30.1% at week 6 (p<0.001), and maximum depth decreased by 14.2% at week 3 (p<0.001) and 27.9% at week 6 (p<0.001) compared to before product use.

### Example 13. Clinical Evaluation of Efficacy of Peptide Cosmetic Formulation on Skin Elasticity

[0160] The clinical efficacy on skin elasticity (Ur/Ue) was evaluated in the same manner as in Example 12. The dermal density was measured using an ultrasound device, DUB® Skinscanner (tpm, Germany). The dermal density of the participants' cheeks was measured before product use (week 0), and at 3 and 6 weeks after product use, and the results were compared and presented in FIG. 20.

[0161] As shown in FIG. 20, skin elasticity (Ur/Ue) increased by 6.9% at week 3 (p<0.001) and 17.8% at week 6 (p<0.001) compared to before product use. The dermal density increased by 18.9% at 3 weeks (p<0.001) and 28.5% at 6 weeks (p<0.001) compared to before product use.

### Example 14. Clinical Evaluation of the Efficacy of Peptide Cosmetic Formulation on Forehead Wrinkles

[0162] The clinical efficacy of the optimized short peptide cosmetic formulation according to the present disclosure on forehead wrinkles was evaluated. Forehead wrinkle areas were photographed using Antera 3D and DSLR before product use. Then, gauze (5 cm×5 cm) soaked with the test product and control group mentioned in Table 17 was applied to the forehead wrinkle area for 8 hours, after which the gauze was removed and the forehead wrinkle area was photographed again using Antera 3D and DSLR at 40 minutes and 2 hours and 40 minutes post removal, and the results are displayed in FIG. 21.

[0163] As shown in FIG. 21, compared to before the removal of the product, a significant improvement in forehead wrinkles was observed, and the wrinkle improvement effect was maintained even after more than 2 hours.

1. An acetylcholine receptor-binding peptide, comprising the amino acid sequence represented by the following Chemical Formula 1:
(R/K)XXX(R/K) [Chemical Formula 1]
(wherein R/K is arginine or lysine, X is any amino acid).

2. An acetylcholine receptor-binding peptide, comprising the amino acid sequence represented by the following Chemical Formula 1-1:
(R/K)XYZ(R/K) [Chemical Formula 1-1]
(wherein R/K represents either arginine or lysine, and XYZ represents a sequence of any three consecutive amino acids, with X being an amino acid selected from R, Q, G, V, L, S, and W, Y being an amino acid selected from R, Q, L, I, F, V, and Y, and Z being an amino acid selected from R, S, L, C, Y, Q, and T).

3. The acetylcholine receptor-binding peptide of claim 2, wherein the peptide comprises an amino acid sequence selected from the group consisting of the amino acid sequences of SEQ ID NOS: 1 to 600.

4. An acetylcholine receptor-binding peptide, comprising the amino acid sequence represented by the following Chemical Formula 1-2:
XRRQRR [Chemical Formula 1-2]
(wherein R represents arginine, Q represents glutamine, and X represents any one amino acid).

5. The acetylcholine receptor-binding peptide of claim 4, wherein the peptide comprises an amino acid sequence selected from the group consisting of the amino acid sequences of SEQ ID NOS: 3601 to 3620.

6. An acetylcholine receptor-binding peptide, comprising the amino acid sequence represented by the following Chemical Formula 1-3:
RRQRRX [Chemical Formula 1-3]
(wherein R represents arginine, Q represents glutamine, and X represents any one amino acid).

7. The acetylcholine receptor-binding peptide of claim 6, wherein the peptide comprises an amino acid sequence selected from the group consisting of the amino acid sequences of SEQ ID NOS: 3621 to 3640.

8. An acetylcholine receptor-binding peptide, comprising the amino acid sequence represented by the following Chemical Formula 2:
(R/K)(R/K)XXX(R/K) [Chemical Formula 2]
(wherein R/K represents either arginine or lysine, and X represents any one amino acid).

9. An acetylcholine receptor-binding peptide, comprising the amino acid sequence represented by the following Chemical Formula 2-1:
(R/K)(R/K)XYZ(R/K) [Chemical Formula 2-1]
(wherein R/K represents either arginine or lysine, XYZ represents a sequence of any three consecutive amino acids, with X being an amino acid selected from R, Q, G, V, L, S, and W, Y being an amino acid selected from R, Q, L, I, F, V, and Y, and Z being an amino acid selected from R, S, L, C, Y, Q, and T).

10. The acetylcholine receptor-binding peptide of claim 9, wherein the peptide comprises an amino acid sequence selected from the group consisting of the amino acid sequences of SEQ ID NO: 1201 to 1800.

11. An acetylcholine receptor-binding peptide, comprising the amino acid sequence represented by the following Chemical Formula 2-2:
XRRGVRR [Chemical Formula 2-2]
(wherein R represents arginine, G represents glycine, V represents valine, and X represents any one amino acid).

12. The acetylcholine receptor-binding peptide of claim 11, wherein the peptide comprises an amino acid sequence selected from the group consisting of the amino acid sequences of SEQ ID NOS: 3641 to 3660.

13. An acetylcholine receptor-binding peptide, comprising the amino acid sequence represented by the following Chemical Formula 2-3:
RRGVRRX [Chemical Formula 2-3]
(wherein R represents arginine, G represents glycine, V represents valine, and X represents any one amino acid).

14. The acetylcholine receptor-binding peptide of claim 13, wherein the peptide comprises an amino acid sequence selected from the group consisting of the amino acid sequences of SEQ ID NOS: 3661 to 3680.

15. An acetylcholine receptor-binding peptide, comprising the amino acid sequence represented by the following Chemical Formula 3:
(R/K)XXX(R/K)(R/K)
(wherein R/K represents either arginine or lysine, and X represents any one amino acid).

16. An acetylcholine receptor-binding peptide, comprising the amino acid sequence represented by the following Chemical Formula 3-1:
(R/K)XYZ(R/K)(R/K) [Chemical Formula 3-1]
(wherein R/K represents either arginine or lysine, XYZ represents a sequence of any three consecutive amino acids, with X being an amino acid selected from R, Q, G, V, L, S, and W, Y being an amino acid selected from R, Q, L, I, F, V, and Y, and Z being an amino acid selected from R, S, L, C, Y, Q, and T).

17. The acetylcholine receptor-binding peptide of claim 16, wherein the peptide comprises an amino acid sequence selected from the group consisting of the amino acid sequences of SEQ ID NOS: 2401 to 3000.

18. The acetylcholine receptor-binding peptide of claim 1, wherein the peptide has a modification to the N-terminus or C-terminus thereof.

19. The acetylcholine receptor-binding peptide of claim 18, the modification to the N-terminus or C-terminus is palmitoylation, acetylation, formylation, PEGylation, or conjugation with 2-mercaptoacetic acid, 3-mercaptopropionic acid, 6-mercaptohexanoic acid, pyroglutamic acid, succinimide acid, amide, cystramine, methyl ester, ethyl ester, benzyl ester, or a fatty acid, such as at least one selected from the group consisting of myristic acid, stearic acid, palmitic acid, cholesterol, 6-amino hexanoic acid, and 8-amino octanoic acid.

20. A polynucleotide, coding for the peptide of claim 1.

21. A composition, comprising the peptide of claim 1, and at least one selected from an adjuvant, an additive, or a pharmaceutically acceptable excipient.

22. A method for prevention or treatment of an acetylcholine receptor hyperactivity-associated disease, comprising administering to a mammal in need thereof an effective amount of the peptide of claim 1.

23. The method of claim 22, wherein the acetylcholine receptor hyperactivity-associated disease is at least one selected from the group consisting of cervical dystonia, limb dystonia, truncal dystonia, blepharospasm, spasticity, hemifacial spasm, strabismus, nystagmus, tics, chronic pain, chronic migraine, neurogenic bladder, detrusor-sphincter dyssynergia, achalasia cardia, hyperhidrosis, neuropathic pain, skin wrinkles, square jaw, and sialorrhea.

24. A method for alleviation of an acetylcholine receptor hyperactivity-associated disease, comprising administering to a mammal in need thereof an effective amount of the peptide of claim 1.

25. A medical device, comprising the composition of claim 21.

26. A method for relief of skin wrinkles comprising administering to a mammal in need thereof an effective amount of the peptide of claim 1.

The application's sequence listing, which the Patent Office published only in electronic form, follows.

SEQUENCE LISTING (3680 sequences)

SEQ ID NO: 1 - protein, 5 aa, synthetic construct
RVQCK

SEQ ID NO: 2 - protein, 5 aa, synthetic construct
KRISR

SEQ ID NO: 3 - protein, 5 aa, synthetic construct
KRVLK

SEQ ID NO: 4 - protein, 5 aa, synthetic construct
KRFLR

SEQ ID NO: 5 - protein, 5 aa, synthetic construct
KLFLR

SEQ ID NO: 6 - protein, 5 aa, synthetic construct
RWQQK

SEQ ID NO: 7 - protein, 5 aa, synthetic construct
RQLTK

SEQ ID NO: 8 - protein, 5 aa, unidentified
RQRSR

SEQ ID NO: 9 - protein, 5 aa, synthetic construct
RGVQR

SEQ ID NO: 10 - protein, 5 aa, synthetic construct
RVQRR

SEQ ID NO: 11 - protein, 5 aa, synthetic construct
KQRLR

SEQ ID NO: 12 - protein, 5 aa, synthetic construct
RVFLR

SEQ ID NO: 13 - protein, 5 aa, synthetic construct
RLISK

SEQ ID NO: 14 - protein, 5 aa, synthetic construct
RWLCK

SEQ ID NO: 15 - protein, 5 aa, synthetic construct
KGVCK

SEQ ID NO: 16 - protein, 5 aa, synthetic construct
KLYTK

SEQ ID NO: 17 - protein, 5 aa, synthetic construct
KRIYK

SEQ ID NO: 18 - protein, 5 aa, synthetic construct
RQLRR

SEQ ID NO: 19 - protein, 5 aa, synthetic construct
KRFQR

SEQ ID NO: 20 - protein, 5 aa, synthetic construct
RGRYK

SEQ ID NO: 21 - protein, 5 aa, synthetic construct
KWFTR

SEQ ID NO: 22 - protein, 5 aa, synthetic construct
RQQLK

SEQ ID NO: 23 - protein, 5 aa, synthetic construct
KWLYK

SEQ ID NO: 24 - protein, 5 aa, unidentified
KSQCR

SEQ ID NO: 25 - protein, 5 aa, synthetic construct
KVVYK

SEQ ID NO: 26 - protein, 5 aa, synthetic construct
RQQQR

SEQ ID NO: 27 - protein, 5 aa, synthetic construct
KGYLR

SEQ ID NO: 28 - protein, 5 aa, synthetic construct
RLLSR

SEQ ID NO: 29 - protein, 5 aa, synthetic construct
KGFCR

SEQ ID NO: 30 - protein, 5 aa, synthetic construct
KSQLR

SEQ ID NO: 31 - protein, 5 aa, synthetic construct
RRLQR

SEQ ID NO: 32 - protein, 5 aa, synthetic construct
RQLSR

SEQ ID NO: 33 - protein, 5 aa, synthetic construct
RRISK

SEQ ID NO: 34 - protein, 5 aa, synthetic construct
KRIRK

SEQ ID NO: 35 - protein, 5 aa, synthetic construct
RWQYK

SEQ ID NO: 36 - protein, 5 aa, synthetic construct
RRLQK

SEQ ID NO: 37 - protein, 5 aa, synthetic construct
RRLSR

SEQ ID NO: 38 - protein, 5 aa, synthetic construct
RGYCK

SEQ ID NO: 39 - protein, 5 aa, synthetic construct
KQVSR

SEQ ID NO: 40 - protein, 5 aa, synthetic construct
KSVCR

SEQ ID NO: 41 - protein, 5 aa, synthetic construct
KVISK

SEQ ID NO: 42 - protein, 5 aa, synthetic construct
RQRLR

SEQ ID NO: 43 - protein, 5 aa, synthetic construct
KSFYR

SEQ ID NO: 44 - protein, 5 aa, synthetic construct
RSRTR

SEQ ID NO: 45 - protein, 5 aa, synthetic construct
RVFQR

SEQ ID NO: 46 - protein, 5 aa, synthetic construct
KRQCK

SEQ ID NO: 47 - protein, 5 aa, synthetic construct
KGVRR

SEQ ID NO: 48 - protein, 5 aa, synthetic construct
RVYLR

SEQ ID NO: 49 - protein, 5 aa, synthetic construct
KWRTR

SEQ ID NO: 50 - protein, 5 aa, synthetic construct
KLLCR

SEQ ID NO: 51 - protein, 5 aa, synthetic construct
RSLQR

SEQ ID NO: 52 - protein, 5 aa, synthetic construct
RQQYK

SEQ ID NO: 53 - protein, 5 aa, synthetic construct
RLVTR

SEQ ID NO: 54 - protein, 5 aa, synthetic construct
KWLQR

SEQ ID NO: 55 - protein, 5 aa, synthetic construct
RRFSR

SEQ ID NO: 56 - protein, 5 aa, synthetic construct
KRFCK

SEQ ID NO: 57 - protein, 5 aa, synthetic construct
KQLYR

SEQ ID NO: 58 - protein, 5 aa, synthetic construct
KWVSK

SEQ ID NO: 59 - protein, 5 aa, synthetic construct
KLQYR

SEQ ID NO: 60 - protein, 5 aa, synthetic construct
RLFTK

SEQ ID NO: 61 - protein, 5 aa, synthetic construct
RLILK

SEQ ID NO: 62 - protein, 5 aa, synthetic construct
KQLTK

SEQ ID NO: 63 - protein, 5 aa, synthetic construct
RLLRK

SEQ ID NO: 64 - protein, 5 aa, synthetic construct
KVVTR

SEQ ID NO: 65 - protein, 5 aa, synthetic construct
RQIRR

SEQ ID NO: 66 - protein, 5 aa, synthetic construct
KRLLR

SEQ ID NO: 67 - protein, 5 aa, synthetic construct
RQLYR

SEQ ID NO: 68 - protein, 5 aa, synthetic construct
RGFYK

SEQ ID NO: 69 - protein, 5 aa, synthetic construct
RSRSR

SEQ ID NO: 70 - protein, 5 aa, synthetic construct
RLLQR

SEQ ID NO: 71 - protein, 5 aa, synthetic construct
KLQSK

SEQ ID NO: 72 - protein, 5 aa, synthetic construct
KLYRR

SEQ ID NO: 73 - protein, 5 aa, synthetic construct
RRQRR

SEQ ID NO: 74 - protein, 5 aa, synthetic construct
RQITK

SEQ ID NO: 75 - protein, 5 aa, synthetic construct
KVQTK

SEQ ID NO: 76 - protein, 5 aa, synthetic construct
RGYRR

SEQ ID NO: 77 - protein, 5 aa, synthetic construct
KWRQK

SEQ ID NO: 78 - protein, 5 aa, synthetic construct
KVICK

SEQ ID NO: 79 - protein, 5 aa, synthetic construct
RWFLR

SEQ ID NO: 80 - protein, 5 aa, synthetic construct
KSRTR

SEQ ID NO: 81 - protein, 5 aa, synthetic construct
RGIYR

SEQ ID NO: 82 - protein, 5 aa, synthetic construct
RQRYK

SEQ ID NO: 83 - protein, 5 aa, synthetic construct
KGFSR

SEQ ID NO: 84 - protein, 5 aa, synthetic construct
RVVRR

SEQ ID NO: 85 - protein, 5 aa, synthetic construct
KGVLK

SEQ ID NO: 86 - protein, 5 aa, synthetic construct
RRLCK

SEQ ID NO: 87 - protein, 5 aa, synthetic construct
RQITR

SEQ ID NO: 88 - protein, 5 aa, synthetic construct
RRVQK

SEQ ID NO: 89 - protein, 5 aa, synthetic construct
KRITK

SEQ ID NO: 90 - protein, 5 aa, synthetic construct
RWYTK

SEQ ID NO: 91 - protein, 5 aa, synthetic construct
RQIQK

SEQ ID NO: 92 - protein, 5 aa, synthetic construct
RVRLK

SEQ ID NO: 93 - protein, 5 aa, synthetic construct
KWVYR

SEQ ID NO: 94 - protein, 5 aa, synthetic construct
RWFQR

SEQ ID NO: 95 - protein, 5 aa, synthetic construct
RGRRK

SEQ ID NO: 96 - protein, 5 aa, synthetic construct
RVLYR

SEQ ID NO: 97 - protein, 5 aa, synthetic construct
KRQLR

SEQ ID NO: 98 - protein, 5 aa, synthetic construct
KWYCK

SEQ ID NO: 99 - protein, 5 aa, synthetic construct
RWICK

SEQ ID NO: 100 - protein, 5 aa, synthetic construct
KVIRK

SEQ ID NO: 101 - protein, 5 aa, synthetic construct
RQQYR

SEQ ID NO: 102 - protein, 5 aa, synthetic construct
RGFSK

SEQ ID NO: 103 - protein, 5 aa, synthetic construct
RWFLK

SEQ ID NO: 104 - protein, 5 aa, synthetic construct
RVVLK

SEQ ID NO: 105 - protein, 5 aa, synthetic construct
RGQQR

SEQ ID NO: 106 - protein, 5 aa, synthetic construct
KLLQR

SEQ ID NO: 107 - protein, 5 aa, synthetic construct
RWVSR

SEQ ID NO: 108 - protein, 5 aa, synthetic construct
KWQLK

SEQ ID NO: 109 - protein, 5 aa, synthetic construct
RLQCR

SEQ ID NO: 110 - protein, 5 aa, synthetic construct
KRRLK

SEQ ID NO: 111 - protein, 5 aa, synthetic construct
KSVLK

SEQ ID NO: 112 - protein, 5 aa, synthetic construct
KRYYR

SEQ ID NO: 113 - protein, 5 aa, synthetic construct
KRLRK

SEQ ID NO: 114 - protein, 5 aa, synthetic construct
KRQRR

SEQ ID NO: 115 - protein, 5 aa, synthetic construct
RWLLR

SEQ ID NO: 116 - protein, 5 aa, synthetic construct
RWRSK

SEQ ID NO: 117 - protein, 5 aa, synthetic construct
RSVYK

SEQ ID NO: 118 - protein, 5 aa, synthetic construct
RVICK

SEQ ID NO: 119 - protein, 5 aa, synthetic construct
KQIRK

SEQ ID NO: 120 - protein, 5 aa, synthetic construct
RQILK

SEQ ID NO: 121 - protein, 5 aa, synthetic construct
RQVTR

SEQ ID NO: 122 - protein, 5 aa, synthetic construct
RSYQK

SEQ ID NO: 123 - protein, 5 aa, synthetic construct
KWIRR

SEQ ID NO: 124 - protein, 5 aa, synthetic construct
KGFSK

SEQ ID NO: 125 - protein, 5 aa, synthetic construct
RVRQK

SEQ ID NO: 126 - protein, 5 aa, synthetic construct
RGVTK

SEQ ID NO: 127 - protein, 5 aa, synthetic construct
RWVTK

SEQ ID NO: 128 - protein, 5 aa, synthetic construct
RGVCR

SEQ ID NO: 129 - protein, 5 aa, synthetic construct
KSLLK

SEQ ID NO: 130 - protein, 5 aa, synthetic construct
RRFRK

SEQ ID NO: 131 - protein, 5 aa, synthetic construct
KLRRR

SEQ ID NO: 132 - protein, 5 aa, synthetic construct
RVRCK

SEQ ID NO: 133 - protein, 5 aa, synthetic construct
KGQRK

SEQ ID NO: 134 - protein, 5 aa, synthetic construct
RQFSK

SEQ ID NO: 135 - protein, 5 aa, synthetic construct
RRLLR

SEQ ID NO: 136 - protein, 5 aa, synthetic construct
RRIYK

SEQ ID NO: 137 - protein, 5 aa, synthetic construct
KGVSK

SEQ ID NO: 138 - protein, 5 aa, synthetic construct
RQRCR

SEQ ID NO: 139 - protein, 5 aa, synthetic construct
RLQYK

SEQ ID NO: 140 - protein, 5 aa, synthetic construct
KWRLR

SEQ ID NO: 141 - protein, 5 aa, synthetic construct
RWQQR

SEQ ID NO: 142 - protein, 5 aa, synthetic construct
RQYSR

SEQ ID NO: 143 - protein, 5 aa, synthetic construct
KGQQR

SEQ ID NO: 144 - protein, 5 aa, synthetic construct
KRFSK

SEQ ID NO: 145 - protein, 5 aa, synthetic construct
RSFSK

SEQ ID NO: 146 - protein, 5 aa, synthetic construct
RWFTK

SEQ ID NO: 147 - protein, 5 aa, synthetic construct
RRYQK

SEQ ID NO: 148 - protein, 5 aa, synthetic construct
RSQTK

SEQ ID NO: 149 - protein, 5 aa, synthetic construct
KQFLR

SEQ ID NO: 150 - protein, 5 aa, synthetic construct
RVRTR

SEQ ID NO: 151 - protein, 5 aa, synthetic construct
RVFTK

SEQ ID NO: 152 - protein, 5 aa, synthetic construct
RRRRR

SEQ ID NO: 153 - protein, 5 aa, synthetic construct
RSIQK

SEQ ID NO: 154 - protein, 5 aa, synthetic construct
RSITR

SEQ ID NO: 155 - protein, 5 aa, synthetic construct
KRYLR

SEQ ID NO: 156 - protein, 5 aa, synthetic construct
KGLRK

SEQ ID NO: 157 - protein, 5 aa, synthetic construct
KGRCR

SEQ ID NO: 158 - protein, 5 aa, synthetic construct
RWQTK

SEQ ID NO: 159 - protein, 5 aa, synthetic construct
RGQRR

SEQ ID NO: 160 - protein, 5 aa, synthetic construct
RSIRR

SEQ ID NO: 161 - protein, 5 aa, synthetic construct
KWVTK

SEQ ID NO: 162 - protein, 5 aa, synthetic construct
RGYQR

SEQ ID NO: 163 - protein, 5 aa, synthetic construct
KSLCK

SEQ ID NO: 164 - protein, 5 aa, synthetic construct
KSICK

SEQ ID NO: 165 - protein, 5 aa, synthetic construct
KWRSK

SEQ ID NO: 166 - protein, 5 aa, synthetic construct
KSFQR

SEQ ID NO: 167 - protein, 5 aa, synthetic construct
KQFRK

SEQ ID NO: 168 - protein, 5 aa, synthetic construct
KLFSK

SEQ ID NO: 169 - protein, 5 aa, synthetic construct
RWYRK

SEQ ID NO: 170 - protein, 5 aa, synthetic construct
RLICK

SEQ ID NO: 171 - protein, 5 aa, synthetic construct
KSIQR

SEQ ID NO: 172 - protein, 5 aa, synthetic construct
RSRRR

SEQ ID NO: 173 - protein, 5 aa, synthetic construct
RSVSR

SEQ ID NO: 174 - protein, 5 aa, synthetic construct
KGRQR

SEQ ID NO: 175 - protein, 5 aa, synthetic construct
RWQLK

SEQ ID NO: 176 - protein, 5 aa, synthetic construct
RVLYK

SEQ ID NO: 177 - protein, 5 aa, synthetic construct
RWVRK

SEQ ID NO: 178 - protein, 5 aa, synthetic construct
RRVLK

SEQ ID NO: 179 - protein, 5 aa, synthetic construct
RLYTK

SEQ ID NO: 180 - protein, 5 aa, synthetic construct
KQRYR

SEQ ID NO: 181 - protein, 5 aa, synthetic construct
RSLLK

SEQ ID NO: 182 - protein, 5 aa, synthetic construct
RVLSK

SEQ ID NO: 183 - protein, 5 aa, synthetic construct
KRVYR

SEQ ID NO: 184 - protein, 5 aa, synthetic construct
KLQCR

SEQ ID NO: 185 - protein, 5 aa, synthetic construct
RRYRR

SEQ ID NO: 186 - protein, 5 aa, synthetic construct
KRLQR

SEQ ID NO: 187 - protein, 5 aa, synthetic construct
RWVCR

SEQ ID NO: 188 - protein, 5 aa, synthetic construct
KWFSK

SEQ ID NO: 189 - protein, 5 aa, synthetic construct
RLLQK

SEQ ID NO: 190 - protein, 5 aa, synthetic construct
RWRSR

SEQ ID NO: 191 - protein, 5 aa, synthetic construct
RVRCR

SEQ ID NO: 192 - protein, 5 aa, synthetic construct
KSFRK

SEQ ID NO: 193 - protein, 5 aa, synthetic construct
RVIRK

SEQ ID NO: 194 - protein, 5 aa, synthetic construct
KWQSK

SEQ ID NO: 195 - protein, 5 aa, synthetic construct
KVVSR

SEQ ID NO: 196 - protein, 5 aa, synthetic construct
RSYYR

SEQ ID NO: 197 - protein, 5 aa, synthetic construct
RSRQK

SEQ ID NO: 198 - protein, 5 aa, synthetic construct
KLISR

SEQ ID NO: 199 - protein, 5 aa, synthetic construct
KRYQR

SEQ ID NO: 200 - protein, 5 aa, synthetic construct
KRVRR

SEQ ID NO: 201 - protein, 5 aa, synthetic construct
RWIYR

SEQ ID NO: 202 - protein, 5 aa, synthetic construct
KWYRR

SEQ ID NO: 203 - protein, 5 aa, synthetic construct
RQLTR

SEQ ID NO: 204 - protein, 5 aa, synthetic construct
RQFQR

SEQ ID NO: 205 - protein, 5 aa, synthetic construct
RWYYR

SEQ ID NO: 206 - protein, 5 aa, synthetic construct
KLQLR

SEQ ID NO: 207 - protein, 5 aa, synthetic construct
KQVRR

SEQ ID NO: 208 - protein, 5 aa, synthetic construct
KLICR

SEQ ID NO: 209 - protein, 5 aa, synthetic construct
RGVRR

SEQ ID NO: 210 - protein, 5 aa, synthetic construct
KVYYR

SEQ ID NO: 211 - protein, 5 aa, synthetic construct
RLYYR

SEQ ID NO: 212 - protein, 5 aa, synthetic construct
KQQYK

SEQ ID NO: 213 - protein, 5 aa, synthetic construct
RQYTK

SEQ ID NO: 214 - protein, 5 aa, synthetic construct
KQQCK

SEQ ID NO: 215 - protein, 5 aa, synthetic construct
RQYRR

SEQ ID NO: 216 - protein, 5 aa, synthetic construct
KWVRR

SEQ ID NO: 217 - protein, 5 aa, synthetic construct
KLQRR

SEQ ID NO: 218 - protein, 5 aa, synthetic construct
KVQYK

SEQ ID NO: 219 - protein, 5 aa, synthetic construct
KQYTR

SEQ ID NO: 220 - protein, 5 aa, synthetic construct
KRILR

SEQ ID NO: 221 - protein, 5 aa, synthetic construct
RGRTR

SEQ ID NO: 222 - protein, 5 aa, synthetic construct
KWLLR

SEQ ID NO: 223 - protein, 5 aa, synthetic construct
KQVRK

SEQ ID NO: 224 - protein, 5 aa, synthetic construct
RLQRR

SEQ ID NO: 225 - protein, 5 aa, synthetic construct
KRQQK

SEQ ID NO: 226 - protein, 5 aa, synthetic construct
RRYTR

SEQ ID NO: 227 - protein, 5 aa, synthetic construct
RRQQR

SEQ ID NO: 228 - protein, 5 aa, synthetic construct
KRFLK

SEQ ID NO: 229 - protein, 5 aa, synthetic construct
KGLTR

SEQ ID NO: 230 - protein, 5 aa, synthetic construct
KVLCR

SEQ ID NO: 231 - protein, 5 aa, synthetic construct
KGLLK

SEQ ID NO: 232 - protein, 5 aa, synthetic construct
KWYTR

SEQ ID NO: 233 - protein, 5 aa, synthetic construct
RVYYK

SEQ ID NO: 234 - protein, 5 aa, synthetic construct
RQYCR

SEQ ID NO: 235 - protein, 5 aa, synthetic construct
KGYSK

SEQ ID NO: 236 - protein, 5 aa, synthetic construct
KRRCK

SEQ ID NO: 237 - protein, 5 aa, synthetic construct
RGLRK

SEQ ID NO: 238 - protein, 5 aa, synthetic construct
KQVLK

SEQ ID NO: 239 - protein, 5 aa, synthetic construct
KRLYR

SEQ ID NO: 240 - protein, 5 aa, synthetic construct
KWRYR

SEQ ID NO: 241 - protein, 5 aa, synthetic construct
KVRCR

SEQ ID NO: 242 - protein, 5 aa, synthetic construct
RGYTK

SEQ ID NO: 243 - protein, 5 aa, synthetic construct
KLLSK

SEQ ID NO: 244 - protein, 5 aa, synthetic construct
KSVSK

SEQ ID NO: 245 - protein, 5 aa, synthetic construct
RQRSK

SEQ ID NO: 246 - protein, 5 aa, synthetic construct
KSFTR

SEQ ID NO: 247 - protein, 5 aa, synthetic construct
RWYCR

SEQ ID NO: 248 - protein, 5 aa, synthetic construct
RWYLK

SEQ ID NO: 249 - protein, 5 aa, synthetic construct
RSYCR

SEQ ID NO: 250 - protein, 5 aa, synthetic construct
RQFSR

SEQ ID NO: 251 - protein, 5 aa, synthetic construct
KRISK

SEQ ID NO: 252 - protein, 5 aa, synthetic construct
KQYRK

SEQ ID NO: 253 - protein, 5 aa, synthetic construct
RSLYR

SEQ ID NO: 254 - protein, 5 aa, synthetic construct
KLLRK

SEQ ID NO: 255 - protein, 5 aa, synthetic construct
KQRTR

SEQ ID NO: 256 - protein, 5 aa, synthetic construct
RGVCK

SEQ ID NO: 257 - protein, 5 aa, synthetic construct
RQFTR

SEQ ID NO: 258 - protein, 5 aa, synthetic construct
KRQYK

SEQ ID NO: 259 - protein, 5 aa, synthetic construct
RLIRK

SEQ ID NO: 260 - protein, 5 aa, synthetic construct
KVYRR

SEQ ID NO: 261 - protein, 5 aa, synthetic construct
RRVLR

SEQ ID NO: 262 - protein, 5 aa, synthetic construct
KSRCR

SEQ ID NO: 263 - protein, 5 aa, synthetic construct
KQVTR

SEQ ID NO: 264 - protein, 5 aa, synthetic construct
KWYRK

SEQ ID NO: 265 - protein, 5 aa, synthetic construct
RWQCR

SEQ ID NO: 266 - protein, 5 aa, synthetic construct
KSYQK

SEQ ID NO: 267 - protein, 5 aa, synthetic construct
KRLLK

SEQ ID NO: 268 - protein, 5 aa, synthetic construct
KRYCK

SEQ ID NO: 269 - protein, 5 aa, synthetic construct
RLFLR

SEQ ID NO: 270 - protein, 5 aa, synthetic construct
RSQQR

SEQ ID NO: 271 - protein, 5 aa, synthetic construct
RGRYR

SEQ ID NO: 272 - protein, 5 aa, synthetic construct
KGYQR

SEQ ID NO: 273 - protein, 5 aa, synthetic construct
RVQSK

SEQ ID NO: 274 - protein, 5 aa, synthetic construct
RQVRK

SEQ ID NO: 275 - protein, 5 aa, synthetic construct
KVYTR

SEQ ID NO: 276 - protein, 5 aa, synthetic construct
RSLRR

SEQ ID NO: 277 - protein, 5 aa, synthetic construct
RVFTR

SEQ ID NO: 278 - protein, 5 aa, synthetic construct
RWQRR

SEQ ID NO: 279 - protein, 5 aa, synthetic construct
RVVTK

SEQ ID NO: 280 - protein, 5 aa, synthetic construct
KWILK

SEQ ID NO: 281 - protein, 5 aa, synthetic construct
RGFLK

SEQ ID NO: 282 - protein, 5 aa, synthetic construct
RVLTR

SEQ ID NO: 283 - protein, 5 aa, synthetic construct
KWVYK

SEQ ID NO: 284 - protein, 5 aa, synthetic construct
KQVQR

SEQ ID NO: 285 - protein, 5 aa, synthetic construct
KGQLK

SEQ ID NO: 286 - protein, 5 aa, synthetic construct
RWFQK

SEQ ID NO: 287 - protein, 5 aa, synthetic construct
KRYRR

SEQ ID NO: 288 - protein, 5 aa, synthetic construct
KLILK

SEQ ID NO: 289 - protein, 5 aa, synthetic construct
RRQYR

SEQ ID NO: 290 - protein, 5 aa, synthetic construct
RGYYR

SEQ ID NO: 291 - protein, 5 aa, synthetic construct
RWFTR

SEQ ID NO: 292 - protein, 5 aa, synthetic construct
KLVCK

SEQ ID NO: 293 - protein, 5 aa, synthetic construct
RQYYR

SEQ ID NO: 294 - protein, 5 aa, synthetic construct
KQYYK

SEQ ID NO: 295 - protein, 5 aa, synthetic construct
RGRCR

SEQ ID NO: 296 - protein, 5 aa, synthetic construct
KWISK

SEQ ID NO: 297 - protein, 5 aa, synthetic construct
RSLRK

SEQ ID NO: 298 - protein, 5 aa, synthetic construct
KSIYR

SEQ ID NO: 299 - protein, 5 aa, synthetic construct
KGRRK

SEQ ID NO: 300 - protein, 5 aa, synthetic construct
RQYRK

SEQ ID NO: 301 - protein, 5 aa, synthetic construct
KWIRK

SEQ ID NO: 302 - protein, 5 aa, synthetic construct
RRILK

SEQ ID NO: 303 - protein, 5 aa, synthetic construct
KGRYR

SEQ ID NO: 304 - protein, 5 aa, synthetic construct
RSVRK

SEQ ID NO: 305 - protein, 5 aa, synthetic construct
KRICK

SEQ ID NO: 306 - protein, 5 aa, synthetic construct
KSYYR

SEQ ID NO: 307 - protein, 5 aa, synthetic construct
KQRCK

SEQ ID NO: 308 - protein, 5 aa, synthetic construct
RLRCR

SEQ ID NO: 309 - protein, 5 aa, synthetic construct
KVQYR

SEQ ID NO: 310 - protein, 5 aa, synthetic construct
KSRQR

SEQ ID NO: 311 - protein, 5 aa, synthetic construct
RSYSR

SEQ ID NO: 312 - protein, 5 aa, synthetic construct
KRYCR

SEQ ID NO: 313 - protein, 5 aa, synthetic construct
RSQLK

SEQ ID NO: 314 - protein, 5 aa, synthetic construct
RWYTR

SEQ ID NO: 315 - protein, 5 aa, synthetic construct
KLFSR

SEQ ID NO: 316 - protein, 5 aa, synthetic construct
KQYLR

SEQ ID NO: 317 - protein, 5 aa, synthetic construct
RRVQR

SEQ ID NO: 318 - protein, 5 aa, synthetic construct
KRVCK

SEQ ID NO: 319 - protein, 5 aa, synthetic construct
RVQTR

SEQ ID NO: 320 - protein, 5 aa, synthetic construct
RVVQR

SEQ ID NO: 321 - protein, 5 aa, synthetic construct
RSLSR

SEQ ID NO: 322 - protein, 5 aa, synthetic construct
RRQSR

SEQ ID NO: 323 - protein, 5 aa, synthetic construct
KWYYR

SEQ ID NO: 324 - protein, 5 aa, synthetic construct
KSQRR

SEQ ID NO: 325 - protein, 5 aa, synthetic construct
KRIQR

SEQ ID NO: 326 - protein, 5 aa, synthetic construct
RRFTK

SEQ ID NO: 327 - protein, 5 aa, synthetic construct
RVLCR

SEQ ID NO: 328 - protein, 5 aa, synthetic construct
RWVLK

SEQ ID NO: 329 - protein, 5 aa, synthetic construct
RRFCR

SEQ ID NO: 330 - protein, 5 aa, synthetic construct
RWQLR

SEQ ID NO: 331 - protein, 5 aa, synthetic construct
RGIQR

SEQ ID NO: 332 - protein, 5 aa, synthetic construct
RRYCR

SEQ ID NO: 333 - protein, 5 aa, synthetic construct
RVLQR

SEQ ID NO: 334 - protein, 5 aa, synthetic construct
KRFYK

SEQ ID NO: 335 - protein, 5 aa, synthetic construct
KSLTR

SEQ ID NO: 336 - protein, 5 aa, synthetic construct
KSVSR

SEQ ID NO: 337 - protein, 5 aa, synthetic construct
KGRSR

SEQ ID NO: 338 - protein, 5 aa, synthetic construct
RWILR

SEQ ID NO: 339 - protein, 5 aa, synthetic construct
KWVRK

SEQ ID NO: 340 - protein, 5 aa, synthetic construct
KGYRR

SEQ ID NO: 341 - protein, 5 aa, synthetic construct
RWYRR

SEQ ID NO: 342 - protein, 5 aa, synthetic construct
KVYQR

SEQ ID NO: 343 - protein, 5 aa, synthetic construct
KSFSR

SEQ ID NO: 344 - protein, 5 aa, synthetic construct
KQFQR

SEQ ID NO: 345 - protein, 5 aa, synthetic construct
RQQRR

SEQ ID NO: 346 - protein, 5 aa, synthetic construct
KGISK

SEQ ID NO: 347 - protein, 5 aa, synthetic construct
KRICR

SEQ ID NO: 348 - protein, 5 aa, synthetic construct
KRQTK

SEQ ID NO: 349 - protein, 5 aa, synthetic construct
KQVYR

SEQ ID NO: 350 - protein, 5 aa, synthetic construct
KSYYK

SEQ ID NO: 351 - protein, 5 aa, synthetic construct
KSFSK

SEQ ID NO: 352 - protein, 5 aa, synthetic construct
RLVRK

SEQ ID NO: 353 - protein, 5 aa, synthetic construct
KSQLK

SEQ ID NO: 354 - protein, 5 aa, synthetic construct
RSQTR

SEQ ID NO: 355 - protein, 5 aa, synthetic construct
KLLYR

SEQ ID NO: 356 - protein, 5 aa, synthetic construct
KQVLR

SEQ ID NO: 357 - protein, 5 aa, synthetic construct
RGFRK

SEQ ID NO: 358 - protein, 5 aa, synthetic construct
KVRSK

SEQ ID NO: 359 - protein, 5 aa, synthetic construct
KRFQK

SEQ ID NO: 360 - protein, 5 aa, synthetic construct
RQLCK

SEQ ID NO: 361 - protein, 5 aa, synthetic construct
RSYQR

SEQ ID NO: 362 - protein, 5 aa, synthetic construct
KQRLK

SEQ ID NO: 363 - protein, 5 aa, synthetic construct
KRVRK

SEQ ID NO: 364 - protein, 5 aa, synthetic construct
RWITR

SEQ ID NO: 365 - protein, 5 aa, synthetic construct
KRRYK

SEQ ID NO: 366 - protein, 5 aa, synthetic construct
RQLQK

SEQ ID NO: 367 - protein, 5 aa, synthetic construct
RSVQK

SEQ ID NO: 368 - protein, 5 aa, synthetic construct
KRIRR

SEQ ID NO: 369 - protein, 5 aa, synthetic construct
RGFTR

SEQ ID NO: 370 - protein, 5 aa, synthetic construct
KWRRK

SEQ ID NO: 371 - protein, 5 aa, synthetic construct
RGISK

SEQ ID NO: 372 - protein, 5 aa, synthetic construct
RSVCR

SEQ ID NO: 373 - protein, 5 aa, synthetic construct
KVFTK

SEQ ID NO: 374 - protein, 5 aa, synthetic construct
KLFTR

SEQ ID NO: 375 - protein, 5 aa, synthetic construct
KQLCR

SEQ ID NO: 376 - protein, 5 aa, unidentified
KGQLR

SEQ ID NO: 377 - protein, 5 aa, synthetic construct
KGFYK

SEQ ID NO: 378 - protein, 5 aa, synthetic construct
RRLSK

SEQ ID NO: 379 - protein, 5 aa, synthetic construct
KSRLR

SEQ ID NO: 380 - protein, 5 aa, synthetic construct
KRYLK

SEQ ID NO: 381 - protein, 5 aa, synthetic construct
KGQRR

SEQ ID NO: 382 - protein, 5 aa, synthetic construct
RLRQR

SEQ ID NO: 383 - protein, 5 aa, synthetic construct
RWQRK

SEQ ID NO: 384 - protein, 5 aa, synthetic construct
KSLRK

SEQ ID NO: 385 - protein, 5 aa, synthetic construct
RGVYR

SEQ ID NO: 386 - protein, 5 aa, synthetic construct
RSFLK

SEQ ID NO: 387 - protein, 5 aa, synthetic construct
RRILR

SEQ ID NO: 388 - protein, 5 aa, synthetic construct
KLFCK

SEQ ID NO: 389 - protein, 5 aa, synthetic construct
KWRRR

SEQ ID NO: 390 - protein, 5 aa, synthetic construct
KRFCR

SEQ ID NO: 391 - protein, 5 aa, synthetic construct
KVFRR

SEQ ID NO: 392 - protein, 5 aa, synthetic construct
RSRLR

SEQ ID NO: 393 - protein, 5 aa, synthetic construct
KSLQR

SEQ ID NO: 394 - protein, 5 aa, synthetic construct
KRRRK

SEQ ID NO: 395 - protein, 5 aa, synthetic construct
RWVCK

SEQ ID NO: 396 - protein, 5 aa, synthetic construct
KVVCR

SEQ ID NO: 397 - protein, 5 aa, synthetic construct
RRITK

SEQ ID NO: 398 - protein, 5 aa, synthetic construct
KGQCR

SEQ ID NO: 399 - protein, 5 aa, synthetic construct
KWIQR

SEQ ID NO: 400 - protein, 5 aa, synthetic construct
RWRCK

SEQ ID NO: 401 - protein, 5 aa, synthetic construct
RGVLR

SEQ ID NO: 402 - protein, 5 aa, synthetic construct
RLRYR

SEQ ID NO: 403 - protein, 5 aa, synthetic construct
RRLYK

SEQ ID NO: 404 - protein, 5 aa, synthetic construct
KGYLK

SEQ ID NO: 405 - protein, 5 aa, synthetic construct
KSYTK

SEQ ID NO: 406 - protein, 5 aa, synthetic construct
KVYLR

SEQ ID NO: 407 - protein, 5 aa, synthetic construct
RQIYK

SEQ ID NO: 408 - protein, 5 aa, synthetic construct
KVFRK

SEQ ID NO: 409 - protein, 5 aa, synthetic construct
KQIYK

SEQ ID NO: 410 - protein, 5 aa, synthetic construct
RRFLR

SEQ ID NO: 411 - protein, 5 aa, synthetic construct
KGRLR

SEQ ID NO: 412 - protein, 5 aa, synthetic construct
RGRSR

SEQ ID NO: 413 - protein, 5 aa, synthetic construct
RWLTR

SEQ ID NO: 414 - protein, 5 aa, synthetic construct
KVRCK

SEQ ID NO: 415 - protein, 5 aa, synthetic construct
KVFLR

SEQ ID NO: 416 - protein, 5 aa, synthetic construct
KLYLR

SEQ ID NO: 417 - protein, 5 aa, synthetic construct
KWLQK

SEQ ID NO: 418 - protein, 5 aa, synthetic construct
RWRTR

SEQ ID NO: 419 - protein, 5 aa, synthetic construct
RVYTR

SEQ ID NO: 420 - protein, 5 aa, synthetic construct
KLFCR

SEQ ID NO: 421 - protein, 5 aa, synthetic construct
RVVYK

SEQ ID NO: 422 - protein, 5 aa, synthetic construct
KWICK

SEQ ID NO: 423 - protein, 5 aa, synthetic construct
RRQLK

SEQ ID NO: 424 - protein, 5 aa, synthetic construct
RVYLK

SEQ ID NO: 425 - protein, 5 aa, synthetic construct
RGFYR

SEQ ID NO: 426 - protein, 5 aa, synthetic construct
RRVSR

SEQ ID NO: 427 - protein, 5 aa, synthetic construct
RGLYR

SEQ ID NO: 428 - protein, 5 aa, synthetic construct
RQFLK

SEQ ID NO: 429 - protein, 5 aa, synthetic construct
KSQYK

SEQ ID NO: 430 - protein, 5 aa, synthetic construct
KWRTK

SEQ ID NO: 431 - protein, 5 aa, synthetic construct
KVQLK

SEQ ID NO: 432 - protein, 5 aa, synthetic construct
RQVRR

SEQ ID NO: 433 - protein, 5 aa, synthetic construct
KWRCR

SEQ ID NO: 434 - protein, 5 aa, synthetic construct
RVLQK

SEQ ID NO: 435 - protein, 5 aa, synthetic construct
KLRQR

SEQ ID NO: 436 - protein, 5 aa, synthetic construct
RVFYK

SEQ ID NO: 437 - protein, 5 aa, synthetic construct
RVRLR

SEQ ID NO: 438 - protein, 5 aa, synthetic construct
RVRSR

SEQ ID NO: 439 - protein, 5 aa, synthetic construct
KRVTR

SEQ ID NO: 440 - protein, 5 aa, synthetic construct
RQVTK

SEQ ID NO: 441 - protein, 5 aa, synthetic construct
KLIRK

SEQ ID NO: 442 - protein, 5 aa, synthetic construct
KVRLR

SEQ ID NO: 443 - protein, 5 aa, synthetic construct
RGFTK

SEQ ID NO: 444 - protein, 5 aa, synthetic construct
KQQYR

SEQ ID NO: 445 - protein, 5 aa, synthetic construct
RLFTR

SEQ ID NO: 446 - protein, 5 aa, synthetic construct
RGLQK

SEQ ID NO: 447 - protein, 5 aa, synthetic construct
KGYYK

SEQ ID NO: 448 - protein, 5 aa, synthetic construct
RQIRK

SEQ ID NO: 449 - protein, 5 aa, synthetic construct
KGLYR

SEQ ID NO: 450 - protein, 5 aa, synthetic construct
RVIQK

SEQ ID NO: 451 - protein, 5 aa, synthetic construct
RQVLK

SEQ ID NO: 452 - protein, 5 aa, synthetic construct
RGVSK

SEQ ID NO: 453 - protein, 5 aa, synthetic construct
KGVCR

SEQ ID NO: 454 - protein, 5 aa, synthetic construct
RQVLR

SEQ ID NO: 455 - protein, 5 aa, synthetic construct
RWLYK

SEQ ID NO: 456 - protein, 5 aa, synthetic construct
RLVCK

SEQ ID NO: 457 - protein, 5 aa, synthetic construct
RGQYK

SEQ ID NO: 458 - protein, 5 aa, synthetic construct
RRFLK

SEQ ID NO: 459 - protein, 5 aa, synthetic construct
RSQLR

SEQ ID NO: 460 - protein, 5 aa, synthetic construct
RLQQR

SEQ ID NO: 461 - protein, 5 aa, synthetic construct
KQLLK

SEQ ID NO: 462 - protein, 5 aa, synthetic construct
RWQSK

SEQ ID NO: 463 - protein, 5 aa, synthetic construct
KWYTK

SEQ ID NO: 464 - protein, 5 aa, synthetic construct
RGVTR

SEQ ID NO: 465 - protein, 5 aa, synthetic construct
RWFRK

SEQ ID NO: 466 - protein, 5 aa, synthetic construct
RRVRK

SEQ ID NO: 467 - protein, 5 aa, synthetic construct
RRIYR

SEQ ID NO: 468 - protein, 5 aa, synthetic construct
RWQCK

SEQ ID NO: 469 - protein, 5 aa, synthetic construct
KSRRR

SEQ ID NO: 470 - protein, 5 aa, synthetic construct
KQRSK

SEQ ID NO: 471 - protein, 5 aa, synthetic construct
RGYLR

SEQ ID NO: 472 - protein, 5 aa, synthetic construct
RRYRK

SEQ ID NO: 473 - protein, 5 aa, synthetic construct
RLVQR

SEQ ID NO: 474 - protein, 5 aa, synthetic construct
RQFLR

SEQ ID NO: 475 - protein, 5 aa, synthetic construct
RRFCK

SEQ ID NO: 476 - protein, 5 aa, synthetic construct
RSICK

SEQ ID NO: 477 - protein, 5 aa, synthetic construct
KGYSR

SEQ ID NO: 478 - protein, 5 aa, synthetic construct
RVQTK

SEQ ID NO: 479 - protein, 5 aa, synthetic construct
RQYYK

SEQ ID NO: 480 - protein, 5 aa, synthetic construct
RWYLR

SEQ ID NO: 481 - protein, 5 aa, synthetic construct
KSYCK

SEQ ID NO: 482 - protein, 5 aa, synthetic construct
KQFCK

SEQ ID NO: 483 - protein, 5 aa, synthetic construct
RSISR

SEQ ID NO: 484 - protein, 5 aa, synthetic construct
RSFQK

SEQ ID NO: 485 - protein, 5 aa, synthetic construct
KRQRK

SEQ ID NO: 486 - protein, 5 aa, unidentified
RWLQR

SEQ ID NO: 487 - protein, 5 aa, synthetic construct
RLVTK

SEQ ID NO: 488 - protein, 5 aa, synthetic construct
KVRSR

SEQ ID NO: 489 - protein, 5 aa, synthetic construct
KSYSR

SEQ ID NO: 490 - protein, 5 aa, synthetic construct
RWLLK

SEQ ID NO: 491 - protein, 5 aa, synthetic construct
KQIRR

SEQ ID NO: 492 - protein, 5 aa, synthetic construct
RVVLR

SEQ ID NO: 493 - protein, 5 aa, synthetic construct
KSIRR

SEQ ID NO: 494 - protein, 5 aa, synthetic construct
RGFCK

SEQ ID NO: 495 - protein, 5 aa, synthetic construct
KVVTK

SEQ ID NO: 496 - protein, 5 aa, synthetic construct
KGIQK

SEQ ID NO: 497 - protein, 5 aa, synthetic construct
KRRCR

SEQ ID NO: 498 - protein, 5 aa, synthetic construct
KLISK

SEQ ID NO: 499 - protein, 5 aa, synthetic construct
RVLTK

SEQ ID NO: 500 - protein, 5 aa, synthetic construct
KSLQK

SEQ ID NO: 501 - protein, 5 aa, synthetic construct
KLQRK

SEQ ID NO: 502 - protein, 5 aa, synthetic construct
RRISR

SEQ ID NO: 503 - protein, 5 aa, synthetic construct
KRVSK

SEQ ID NO: 504 - protein, 5 aa, synthetic construct
KQIQR

SEQ ID NO: 505 - protein, 5 aa, synthetic construct
RQIYR

SEQ ID NO: 506 - protein, 5 aa, synthetic construct
RGRLR

SEQ ID NO: 507 - protein, 5 aa, synthetic construct
KWVQK

SEQ ID NO: 508 - protein, 5 aa, synthetic construct
KGLQK

SEQ ID NO: 509 - protein, 5 aa, synthetic construct
RVQRK

SEQ ID NO: 510 - protein, 5 aa, synthetic construct
RQLSK

SEQ ID NO: 511 - protein, 5 aa, synthetic construct
KSLSR

SEQ ID NO: 512 - protein, 5 aa, synthetic construct
RLYLK

SEQ ID NO: 513 - protein, 5 aa, synthetic construct
RWYYK

SEQ ID NO: 514 - protein, 5 aa, synthetic construct
KLLLK

SEQ ID NO: 515 - protein, 5 aa, synthetic construct
RGQRK

SEQ ID NO: 516 - protein, 5 aa, synthetic construct
KWQTR

SEQ ID NO: 517 - protein, 5 aa, synthetic construct
KGYTR

SEQ ID NO: 518 - protein, 5 aa, synthetic construct
RVYYR

SEQ ID NO: 519 - protein, 5 aa, synthetic construct
RLYSK

SEQ ID NO: 520 - protein, 5 aa, synthetic construct
RVLLK

SEQ ID NO: 521 - protein, 5 aa, synthetic construct
KRFRK

SEQ ID NO: 522 - protein, 5 aa, synthetic construct
RLVYR

SEQ ID NO: 523 - protein, 5 aa, synthetic construct
KQFQK

SEQ ID NO: 524 - protein, 5 aa, synthetic construct
RRICR

SEQ ID NO: 525 - protein, 5 aa, synthetic construct
KQRYK

SEQ ID NO: 526 - protein, 5 aa, synthetic construct
KQFSR

SEQ ID NO: 527 - protein, 5 aa, synthetic construct
KSVQR

SEQ ID NO: 528 - protein, 5 aa, synthetic construct
RVLLR

SEQ ID NO: 529 - protein, 5 aa, synthetic construct
RVQSR

SEQ ID NO: 530 - protein, 5 aa, synthetic construct
RWRRR

SEQ ID NO: 531 - protein, 5 aa, synthetic construct
KRQSR

SEQ ID NO: 532 - protein, 5 aa, synthetic construct
KQICK

SEQ ID NO: 533 - protein, 5 aa, synthetic construct
RLVYK

SEQ ID NO: 534 - protein, 5 aa, synthetic construct
RRQLR

SEQ ID NO: 535 - protein, 5 aa, synthetic construct
KSLLR

SEQ ID NO: 536 - protein, 5 aa, synthetic construct
RLITK

SEQ ID NO: 537 - protein, 5 aa, synthetic construct
RLRLR

SEQ ID NO: 538 - protein, 5 aa, synthetic construct
KQQQR

SEQ ID NO: 539 - protein, 5 aa, synthetic construct
RVVTR

SEQ ID NO: 540 - protein, 5 aa, synthetic construct
RQFYR

SEQ ID NO: 541 - protein, 5 aa, synthetic construct
KVFLK

SEQ ID NO: 542 - protein, 5 aa, synthetic construct
KRYTR

SEQ ID NO: 543 - protein, 5 aa, synthetic construct
RLRLK

SEQ ID NO: 544 - protein, 5 aa, synthetic construct
RLQLR

SEQ ID NO: 545 - protein, 5 aa, synthetic construct
KGQYR

SEQ ID NO: 546 - protein, 5 aa, synthetic construct
KVVLK

SEQ ID NO: 547 - protein, 5 aa, synthetic construct
KQVTK

SEQ ID NO: 548 - protein, 5 aa, synthetic construct
KWLCK

SEQ ID NO: 549 - protein, 5 aa, synthetic construct
KWITK

SEQ ID NO: 550 - protein, 5 aa, synthetic construct
RQQSR

SEQ ID NO: 551 - protein, 5 aa, synthetic construct
RWQYR

SEQ ID NO: 552 - protein, 5 aa, synthetic construct
RLYSR

SEQ ID NO: 553 - protein, 5 aa, synthetic construct
KLLSR

SEQ ID NO: 554 - protein, 5 aa, synthetic construct
RLLSK

SEQ ID NO: 555 - protein, 5 aa, synthetic construct
KVQCK

SEQ ID NO: 556 - protein, 5 aa, synthetic construct
RVIYK

SEQ ID NO: 557 - protein, 5 aa, synthetic construct
KQRRK

SEQ ID NO: 558 - protein, 5 aa, synthetic construct
RWRYK

SEQ ID NO: 559 - protein, 5 aa, synthetic construct
KQQLK

SEQ ID NO: 560 - protein, 5 aa, synthetic construct
KWYQR

SEQ ID NO: 561 - protein, 5 aa, synthetic construct
KWRCK

SEQ ID NO: 562 - protein, 5 aa, synthetic construct
RVRQR

SEQ ID NO: 563 - protein, 5 aa, synthetic construct
RLVLK

SEQ ID NO: 564 - protein, 5 aa, synthetic construct
RSRYR

SEQ ID NO: 565 - protein, 5 aa, synthetic construct
RLVSK

SEQ ID NO: 566 - protein, 5 aa, synthetic construct
KQLYK

SEQ ID NO: 567 - protein, 5 aa, synthetic construct
RRYCK

SEQ ID NO: 568 - protein, 5 aa, synthetic construct
KQITR

SEQ ID NO: 569 - protein, 5 aa, synthetic construct
RQQRK

SEQ ID NO: 570 - protein, 5 aa, synthetic construct
KLVRR

SEQ ID NO: 571 - protein, 5 aa, synthetic construct
RRLTK

SEQ ID NO: 572 - protein, 5 aa, synthetic construct
KLRTK

SEQ ID NO: 573 - protein, 5 aa, synthetic construct
RSIYR

SEQ ID NO: 574 - protein, 5 aa, synthetic construct
KGFTR

SEQ ID NO: 575 - protein, 5 aa, synthetic construct
KGFYR

SEQ ID NO: 576 - protein, 5 aa, synthetic construct
RLFRK

SEQ ID NO: 577 - protein, 5 aa, synthetic construct
KLVTK

SEQ ID NO: 578 - protein, 5 aa, synthetic construct
KSVLR

SEQ ID NO: 579 - protein, 5 aa, synthetic construct
RSLYK

SEQ ID NO: 580 - protein, 5 aa, synthetic construct
RGYTR

SEQ ID NO: 581 - protein, 5 aa, synthetic construct
KGVLR

SEQ ID NO: 582 - protein, 5 aa, synthetic construct
RGICK

SEQ ID NO: 583 - protein, 5 aa, synthetic construct
KVVYR

SEQ ID NO: 584 - protein, 5 aa, synthetic construct
KQIQK

SEQ ID NO: 585 - protein, 5 aa, synthetic construct
RSVSK

SEQ ID NO: 586 - protein, 5 aa, synthetic construct
KGRRR

SEQ ID NO: 587 - protein, 5 aa, synthetic construct
RVITR

SEQ ID NO: 588 - protein, 5 aa, synthetic construct
RSFTR

SEQ ID NO: 589 - protein, 5 aa, synthetic construct
KGLCR

SEQ ID NO: 590 - protein, 5 aa, synthetic construct
KQYTK

SEQ ID NO: 591 - protein, 5 aa, synthetic construct
RVYTK

SEQ ID NO: 592 - protein, 5 aa, synthetic construct
RWLCR

SEQ ID NO: 593 - protein, 5 aa, synthetic construct
KQYLK

SEQ ID NO: 594 - protein, 5 aa, synthetic construct
KQYSR

SEQ ID NO: 595 - protein, 5 aa, synthetic construct
KWQQR

SEQ ID NO: 596 - protein, 5 aa, synthetic construct
KLQQR

SEQ ID NO: 597 - protein, 5 aa, synthetic construct
KLVSR

SEQ ID NO: 598 - protein, 5 aa, synthetic construct
RVRSK

SEQ ID NO: 599 - protein, 5 aa, synthetic construct
KWVSR

SEQ ID NO: 600 - protein, 5 aa, synthetic construct
KLYSK

SEQ ID NO: 601 - protein, 5 aa, synthetic construct
RFCFK

SEQ ID NO: 602 - protein, 5 aa, synthetic construct
KMSVR

SEQ ID NO: 603 - protein, 5 aa, synthetic construct
RKEPK

SEQ ID NO: 604 - protein, 5 aa, synthetic construct
RKEGK

SEQ ID NO: 605 - protein, 5 aa, synthetic construct
RECFK

SEQ ID NO: 606 - protein, 5 aa, synthetic construct
RIHWK

SEQ ID NO: 607 - protein, 5 aa, synthetic construct
RIEER

SEQ ID NO: 608 - protein, 5 aa, synthetic construct
RDSER

SEQ ID NO: 609 - protein, 5 aa, synthetic construct
RKTMK

SEQ ID NO: 610 - protein, 5 aa, synthetic construct
KCDDK

SEQ ID NO: 611 - protein, 5 aa, synthetic construct
KDHIR

SEQ ID NO: 612 - protein, 5 aa, synthetic construct
KCTDK

SEQ ID NO: 613 - protein, 5 aa, synthetic construct
RAEFR

SEQ ID NO: 614 - protein, 5 aa, synthetic construct
RNTWK

SEQ ID NO: 615 - protein, 5 aa, synthetic construct
KCCNR

SEQ ID NO: 616 - protein, 5 aa, synthetic construct
KFCPR

SEQ ID NO: 617 - protein, 5 aa, synthetic construct
RYCAK

SEQ ID NO: 618 - protein, 5 aa, synthetic construct
RMSWK

SEQ ID NO: 619 - protein, 5 aa, synthetic construct
KCSFK

SEQ ID NO: 620 - protein, 5 aa, synthetic construct
RCMHK

SEQ ID NO: 621 - protein, 5 aa, synthetic construct
KKSMK

SEQ ID NO: 622 - protein, 5 aa, synthetic construct
RKPKR

SEQ ID NO: 623 - protein, 5 aa, synthetic construct
KNTGR

SEQ ID NO: 624 - protein, 5 aa, synthetic construct
KEHER

SEQ ID NO: 625 - protein, 5 aa, synthetic construct
KMCDR

SEQ ID NO: 626 - protein, 5 aa, synthetic construct
KICMR

SEQ ID NO: 627 - protein, 5 aa, synthetic construct
KMSPK

SEQ ID NO: 628 - protein, 5 aa, synthetic construct
RYMDR

SEQ ID NO: 629 - protein, 5 aa, synthetic construct
RPTNK

SEQ ID NO: 630 - protein, 5 aa, synthetic construct
RITFR

SEQ ID NO: 631 - protein, 5 aa, synthetic construct
RPANR

SEQ ID NO: 632 - protein, 5 aa, synthetic construct
RFSHR

SEQ ID NO: 633 - protein, 5 aa, synthetic construct
RAAKR

SEQ ID NO: 634 - protein, 5 aa, synthetic construct
RMMMR

SEQ ID NO: 635 - protein, 5 aa, synthetic construct
RMNGR

SEQ ID NO: 636 - protein, 5 aa, synthetic construct
KDKGR

SEQ ID NO: 637 - protein, 5 aa, synthetic construct
KCDHK

SEQ ID NO: 638 - protein, 5 aa, synthetic construct
KHCIR

SEQ ID NO: 639 - protein, 5 aa, synthetic construct
KETWK

SEQ ID NO: 640 - protein, 5 aa, synthetic construct
KNPHK

SEQ ID NO: 641 - protein, 5 aa, synthetic construct
RITWK

SEQ ID NO: 642 - protein, 5 aa, synthetic construct
RAWDR

SEQ ID NO: 643 - protein, 5 aa, synthetic construct
KHDGR

SEQ ID NO: 644 - protein, 5 aa, synthetic construct
RMKWK

SEQ ID NO: 645 - protein, 5 aa, synthetic construct
RHKDK

SEQ ID NO: 646 - protein, 5 aa, synthetic construct
KDTKR

SEQ ID NO: 647 - protein, 5 aa, synthetic construct
KHTVK

SEQ ID NO: 648 - protein, 5 aa, synthetic construct
KNKKR

SEQ ID NO: 649 - protein, 5 aa, synthetic construct
RYSFK

SEQ ID NO: 650 - protein, 5 aa, synthetic construct
RPEDK

SEQ ID NO: 651 - protein, 5 aa, synthetic construct
RFTVR

SEQ ID NO: 652 - protein, 5 aa, synthetic construct
RCAAR

SEQ ID NO: 653 - protein, 5 aa, synthetic construct
KTTWK

SEQ ID NO: 654 - protein, 5 aa, synthetic construct
KEWNR

SEQ ID NO: 655 - protein, 5 aa, synthetic construct
RKCIR

SEQ ID NO: 656 - protein, 5 aa, synthetic construct
KATGR

SEQ ID NO: 657 - protein, 5 aa, synthetic construct
KDNDR

SEQ ID NO: 658 - protein, 5 aa, synthetic construct
KKWGR

SEQ ID NO: 659 - protein, 5 aa, synthetic construct
KIHEK

SEQ ID NO: 660 - protein, 5 aa, synthetic construct
KFDVK

SEQ ID NO: 661 - protein, 5 aa, synthetic construct
RCNMK

SEQ ID NO: 662 - protein, 5 aa, synthetic construct
KIEEK

SEQ ID NO: 663 - protein, 5 aa, synthetic construct
RATPR

SEQ ID NO: 664 - protein, 5 aa, synthetic construct
KPTWR

SEQ ID NO: 665 - protein, 5 aa, synthetic construct
KTWEK

SEQ ID NO: 666 - protein, 5 aa, synthetic construct
RHDWR

SEQ ID NO: 667 - protein, 5 aa, synthetic construct
RDCHR

SEQ ID NO: 668 - protein, 5 aa, synthetic construct
RPHAK

SEQ ID NO: 669 - protein, 5 aa, synthetic construct
RNPER

SEQ ID NO: 670 - protein, 5 aa, synthetic construct
KPCVK

SEQ ID NO: 671 - protein, 5 aa, synthetic construct
KMNAK

SEQ ID NO: 672 - protein, 5 aa, synthetic construct
KHAPK

SEQ ID NO: 673 - protein, 5 aa, synthetic construct
RISPR

SEQ ID NO: 674 - protein, 5 aa, synthetic construct
KETHR

SEQ ID NO: 675 - protein, 5 aa, synthetic construct
RKPGR

SEQ ID NO: 676 - protein, 5 aa, synthetic construct
RTMFR

SEQ ID NO: 677 - protein, 5 aa, synthetic construct
RCEMR

SEQ ID NO: 678 - protein, 5 aa, synthetic construct
KYMGR

SEQ ID NO: 679 - protein, 5 aa, synthetic construct
KKTVK

SEQ ID NO: 680 - protein, 5 aa, synthetic construct
RFTER

SEQ ID NO: 681 - protein, 5 aa, synthetic construct
KDTMR

SEQ ID NO: 682 - protein, 5 aa, synthetic construct
KPNVK

SEQ ID NO: 683 - protein, 5 aa, synthetic construct
KYPDK

SEQ ID NO: 684 - protein, 5 aa, synthetic construct
KCAER

SEQ ID NO: 685 - protein, 5 aa, synthetic construct
RNDIK

SEQ ID NO: 686 - protein, 5 aa, synthetic construct
RFNIR

SEQ ID NO: 687 - protein, 5 aa, synthetic construct
RMEIR

SEQ ID NO: 688 - protein, 5 aa, synthetic construct
RPHFK

SEQ ID NO: 689 - protein, 5 aa, synthetic construct
RFSDK

SEQ ID NO: 690 - protein, 5 aa, synthetic construct
RAEIK

SEQ ID NO: 691 - protein, 5 aa, synthetic construct
KEWEK

SEQ ID NO: 692 - protein, 5 aa, synthetic construct
RDHWK

SEQ ID NO: 693 - protein, 5 aa, synthetic construct
RPSKK

SEQ ID NO: 694 - protein, 5 aa, synthetic construct
KNNAR

SEQ ID NO: 695 - protein, 5 aa, synthetic construct
KKPDR

SEQ ID NO: 696 - protein, 5 aa, synthetic construct
RCEHR

SEQ ID NO: 697 - protein, 5 aa, synthetic construct
KASKK

SEQ ID NO: 698 - protein, 5 aa, synthetic construct
KFDWK

SEQ ID NO: 699 - protein, 5 aa, synthetic construct
KKNER

SEQ ID NO: 700 - protein, 5 aa, synthetic construct
RAWER

SEQ ID NO: 701 - protein, 5 aa, unidentified
RNHNK

SEQ ID NO: 702 - protein, 5 aa, synthetic construct
KISHK

SEQ ID NO: 703 - protein, 5 aa, synthetic construct
KPNWR

SEQ ID NO: 704 - protein, 5 aa, synthetic construct
RFMGK

SEQ ID NO: 705 - protein, 5 aa, synthetic construct
RHAKK

SEQ ID NO: 706 - protein, 5 aa, synthetic construct
RKMAK

SEQ ID NO: 707 - protein, 5 aa, synthetic construct
KIEAK

SEQ ID NO: 708 - protein, 5 aa, synthetic construct
KPKAR

SEQ ID NO: 709 - protein, 5 aa, synthetic construct
RHTIR

SEQ ID NO: 710 - protein, 5 aa, synthetic construct
KEKAR

SEQ ID NO: 711 - protein, 5 aa, synthetic construct
KECIK

SEQ ID NO: 712 - protein, 5 aa, synthetic construct
RADFK

SEQ ID NO: 713 - protein, 5 aa, synthetic construct
KYPKK

SEQ ID NO: 714 - protein, 5 aa, synthetic construct
RPCAK

SEQ ID NO: 715 - protein, 5 aa, synthetic construct
KCNGR

SEQ ID NO: 716 - protein, 5 aa, synthetic construct
KINVR

SEQ ID NO: 717 - protein, 5 aa, synthetic construct
KCKFR

SEQ ID NO: 718 - protein, 5 aa, synthetic construct
RNKKK

SEQ ID NO: 719 - protein, 5 aa, synthetic construct
KISER

SEQ ID NO: 720 - protein, 5 aa, synthetic construct
KDPKR

SEQ ID NO: 721 - protein, 5 aa, synthetic construct
RYSKK

SEQ ID NO: 722 - protein, 5 aa, synthetic construct
KNHKK

SEQ ID NO: 723 - protein, 5 aa, synthetic construct
RASPR

SEQ ID NO: 724 - protein, 5 aa, synthetic construct
KTTAK

SEQ ID NO: 725 - protein, 5 aa, synthetic construct
RNADR

SEQ ID NO: 726 - protein, 5 aa, synthetic construct
KATMK

SEQ ID NO: 727 - protein, 5 aa, synthetic construct
KMDAR

SEQ ID NO: 728 - protein, 5 aa, synthetic construct
KPHIK

SEQ ID NO: 729 - protein, 5 aa, synthetic construct
KEPDK

SEQ ID NO: 730 - protein, 5 aa, synthetic construct
KFCNK

SEQ ID NO: 731 - protein, 5 aa, synthetic construct
KADHK

SEQ ID NO: 732 - protein, 5 aa, synthetic construct
KIMWR

SEQ ID NO: 733 - protein, 5 aa, synthetic construct
KTCDR

SEQ ID NO: 734 - protein, 5 aa, synthetic construct
KATER

SEQ ID NO: 735 - protein, 5 aa, synthetic construct
RHCER

SEQ ID NO: 736 - protein, 5 aa, synthetic construct
KKHHR

SEQ ID NO: 737 - protein, 5 aa, synthetic construct
RINVR

SEQ ID NO: 738 - protein, 5 aa, synthetic construct
KTPMK

SEQ ID NO: 739 - protein, 5 aa, synthetic construct
KDCPR

SEQ ID NO: 740 - protein, 5 aa, synthetic construct
RMMGK

SEQ ID NO: 741 - protein, 5 aa, synthetic construct
KPTPR

SEQ ID NO: 742 - protein, 5 aa, synthetic construct
RNSDK

SEQ ID NO: 743 - protein, 5 aa, synthetic construct
KYAFR

SEQ ID NO: 744 - protein, 5 aa, synthetic construct
KTEAK

SEQ ID NO: 745 - protein, 5 aa, synthetic construct
RMEIK

SEQ ID NO: 746 - protein, 5 aa, synthetic construct
RMTVK

SEQ ID NO: 747 - protein, 5 aa, synthetic construct
RKTDK

SEQ ID NO: 748 - protein, 5 aa, synthetic construct
REPMK

SEQ ID NO: 749 - protein, 5 aa, synthetic construct
KHTWR

SEQ ID NO: 750 - protein, 5 aa, synthetic construct
KEADK

SEQ ID NO: 751 - protein, 5 aa, synthetic construct
RYMMR

SEQ ID NO: 752 - protein, 5 aa, synthetic construct
KAWVK

SEQ ID NO: 753 - protein, 5 aa, synthetic construct
RKTPK

SEQ ID NO: 754 - protein, 5 aa, synthetic construct
RKNER

SEQ ID NO: 755 - protein, 5 aa, synthetic construct
KNWDR

SEQ ID NO: 756 - protein, 5 aa, synthetic construct
RCDWR

SEQ ID NO: 757 - protein, 5 aa, synthetic construct
KYCMR

SEQ ID NO: 758 - protein, 5 aa, synthetic construct
KCDFK

SEQ ID NO: 759 - protein, 5 aa, synthetic construct
KHKMR

SEQ ID NO: 760 - protein, 5 aa, synthetic construct
RIWAR

SEQ ID NO: 761 - protein, 5 aa, synthetic construct
RMPWR

SEQ ID NO: 762 - protein, 5 aa, synthetic construct
KMPER

SEQ ID NO: 763 - protein, 5 aa, synthetic construct
RCHVR

SEQ ID NO: 764 - protein, 5 aa, synthetic construct
KTWPK

SEQ ID NO: 765 - protein, 5 aa, synthetic construct
RNEFR

SEQ ID NO: 766 - protein, 5 aa, synthetic construct
RNMEK

SEQ ID NO: 767 - protein, 5 aa, synthetic construct
RFHFK

SEQ ID NO: 768 - protein, 5 aa, synthetic construct
RDSWR

SEQ ID NO: 769 - protein, 5 aa, synthetic construct
KTEWK

SEQ ID NO: 770 - protein, 5 aa, synthetic construct
KKPFR

SEQ ID NO: 771 - protein, 5 aa, synthetic construct
RKWVK

SEQ ID NO: 772 - protein, 5 aa, synthetic construct
KYWFK

SEQ ID NO: 773 - protein, 5 aa, synthetic construct
RPNMR

SEQ ID NO: 774 - protein, 5 aa, synthetic construct
RTCDR

SEQ ID NO: 775 - protein, 5 aa, synthetic construct
RHTVK

SEQ ID NO: 776 - protein, 5 aa, synthetic construct
RCDFR

SEQ ID NO: 777 - protein, 5 aa, synthetic construct
RYNWK

SEQ ID NO: 778 - protein, 5 aa, synthetic construct
KKDHK

SEQ ID NO: 779 - protein, 5 aa, synthetic construct
KYPPR

SEQ ID NO: 780 - protein, 5 aa, synthetic construct
RDSHK

SEQ ID NO: 781 - protein, 5 aa, synthetic construct
RIDPR

SEQ ID NO: 782 - protein, 5 aa, synthetic construct
KANAR

SEQ ID NO: 783 - protein, 5 aa, synthetic construct
KCKVR

SEQ ID NO: 784 - protein, 5 aa, synthetic construct
RACEK

SEQ ID NO: 785 - protein, 5 aa, synthetic construct
KPTIR

SEQ ID NO: 786 - protein, 5 aa, synthetic construct
RFNKK

SEQ ID NO: 787 - protein, 5 aa, synthetic construct
KDNIR

SEQ ID NO: 788 - protein, 5 aa, synthetic construct
KYHGK

SEQ ID NO: 789 - protein, 5 aa, synthetic construct
KFWIR

SEQ ID NO: 790 - protein, 5 aa, synthetic construct
REAGK

SEQ ID NO: 791 - protein, 5 aa, synthetic construct
KTKMR

SEQ ID NO: 792 - protein, 5 aa, synthetic construct
RMEKK

SEQ ID NO: 793 - protein, 5 aa, synthetic construct
KKPHR

SEQ ID NO: 794 - protein, 5 aa, synthetic construct
KEAPK

SEQ ID NO: 795 - protein, 5 aa, synthetic construct
RTKKR

SEQ ID NO: 796 - protein, 5 aa, synthetic construct
KNWVR

SEQ ID NO: 797 - protein, 5 aa, synthetic construct
KETHK

SEQ ID NO: 798 - protein, 5 aa, synthetic construct
RETMK

SEQ ID NO: 799 - protein, 5 aa, synthetic construct
KDKPR

SEQ ID NO: 800 - protein, 5 aa, synthetic construct
KEAPR

SEQ ID NO: 801 - protein, 5 aa, synthetic construct
KFHGR

SEQ ID NO: 802 - protein, 5 aa, synthetic construct
RITVR

SEQ ID NO: 803 - protein, 5 aa, synthetic construct
RFSDR

SEQ ID NO: 804 - protein, 5 aa, synthetic construct
RNTIR

SEQ ID NO: 805 - protein, 5 aa, synthetic construct
RPTNR

SEQ ID NO: 806 - protein, 5 aa, synthetic construct
RKMFR

SEQ ID NO: 807 - protein, 5 aa, synthetic construct
RKNKK

SEQ ID NO: 808 - protein, 5 aa, synthetic construct
KFCIR

SEQ ID NO: 809 - protein, 5 aa, synthetic construct
RKSGK

SEQ ID NO: 810 - protein, 5 aa, synthetic construct
KFHKK

SEQ ID NO: 811 - protein, 5 aa, synthetic construct
KMTMR

SEQ ID NO: 812 - protein, 5 aa, synthetic construct
KTEGR

SEQ ID NO: 813 - protein, 5 aa, synthetic construct
RAHVR

SEQ ID NO: 814 - protein, 5 aa, synthetic construct
RITMR

SEQ ID NO: 815 - protein, 5 aa, synthetic construct
RKDHR

SEQ ID NO: 816 - protein, 5 aa, synthetic construct
RKPIK

SEQ ID NO: 817 - protein, 5 aa, synthetic construct
RHKDR

SEQ ID NO: 818 - protein, 5 aa, synthetic construct
KHWHR

SEQ ID NO: 819 - protein, 5 aa, synthetic construct
RNTIK

SEQ ID NO: 820 - protein, 5 aa, synthetic construct
RIMHK

SEQ ID NO: 821 - protein, 5 aa, synthetic construct
RESDR

SEQ ID NO: 822 - protein, 5 aa, synthetic construct
RAKGK

SEQ ID NO: 823 - protein, 5 aa, synthetic construct
KECFK

SEQ ID NO: 824 - protein, 5 aa, synthetic construct
KIDMK

SEQ ID NO: 825 - protein, 5 aa, synthetic construct
RDEKK

SEQ ID NO: 826 - protein, 5 aa, synthetic construct
KCKMK

SEQ ID NO: 827 - protein, 5 aa, synthetic construct
KKAGR

SEQ ID NO: 828 - protein, 5 aa, synthetic construct
RFCWR

SEQ ID NO: 829 - protein, 5 aa, synthetic construct
KCWHR

SEQ ID NO: 830 - protein, 5 aa, synthetic construct
RIDGK

SEQ ID NO: 831 - protein, 5 aa, synthetic construct
RAAGK

SEQ ID NO: 832 - protein, 5 aa, synthetic construct
RMHER

SEQ ID NO: 833 - protein, 5 aa, synthetic construct
KATAK

SEQ ID NO: 834 - protein, 5 aa, synthetic construct
RMNIK

SEQ ID NO: 835 - protein, 5 aa, synthetic construct
RFMMR

SEQ ID NO: 836 - protein, 5 aa, synthetic construct
REWNR

SEQ ID NO: 837 - protein, 5 aa, synthetic construct
RPMDR

SEQ ID NO: 838 - protein, 5 aa, synthetic construct
RHSMK

SEQ ID NO: 839 - protein, 5 aa, synthetic construct
RHHDK

SEQ ID NO: 840 - protein, 5 aa, synthetic construct
KDTAR

SEQ ID NO: 841 - protein, 5 aa, synthetic construct
KNEMR

SEQ ID NO: 842 - protein, 5 aa, synthetic construct
RHNVK

SEQ ID NO: 843 - protein, 5 aa, synthetic construct
KTTPK

SEQ ID NO: 844 - protein, 5 aa, synthetic construct
KTDPR

SEQ ID NO: 845 - protein, 5 aa, synthetic construct
RYEDR

SEQ ID NO: 846 - protein, 5 aa, synthetic construct
RPDWR

SEQ ID NO: 847 - protein, 5 aa, synthetic construct
KAPEK

SEQ ID NO: 848 - protein, 5 aa, synthetic construct
RYMVK

SEQ ID NO: 849 - protein, 5 aa, synthetic construct
KTWMK

SEQ ID NO: 850 - protein, 5 aa, synthetic construct
KYDIR

SEQ ID NO: 851 - protein, 5 aa, synthetic construct
KMCWK

SEQ ID NO: 852 - protein, 5 aa, synthetic construct
KDSMK

SEQ ID NO: 853 - protein, 5 aa, synthetic construct
RYHIK

SEQ ID NO: 854 - protein, 5 aa, synthetic construct
RNTER

SEQ ID NO: 855 - protein, 5 aa, synthetic construct
RFMKK

SEQ ID NO: 856 - protein, 5 aa, synthetic construct
KPPDR

SEQ ID NO: 857 - protein, 5 aa, synthetic construct
KMENR

SEQ ID NO: 858 - protein, 5 aa, synthetic construct
RIMGR

SEQ ID NO: 859 - protein, 5 aa, synthetic construct
KHNAR

SEQ ID NO: 860 - protein, 5 aa, synthetic construct
RCHAK

SEQ ID NO: 861 - protein, 5 aa, synthetic construct
KTKIR

SEQ ID NO: 862 - protein, 5 aa, synthetic construct
KKNAK

SEQ ID NO: 863 - protein, 5 aa, synthetic construct
REANR

SEQ ID NO: 864 - protein, 5 aa, synthetic construct
KYHPR

SEQ ID NO: 865 - protein, 5 aa, synthetic construct
RMMER

SEQ ID NO: 866 - protein, 5 aa, synthetic construct
RINWR

SEQ ID NO: 867 - protein, 5 aa, synthetic construct
KDSWK

SEQ ID NO: 868 - protein, 5 aa, synthetic construct
KMHFK

SEQ ID NO: 869 - protein, 5 aa, synthetic construct
KKHPK

SEQ ID NO: 870 - protein, 5 aa, synthetic construct
RCKVK

SEQ ID NO: 871 - protein, 5 aa, synthetic construct
RHSHR

SEQ ID NO: 872 - protein, 5 aa, synthetic construct
RKKWK

SEQ ID NO: 873 - protein, 5 aa, synthetic construct
RYNFR

SEQ ID NO: 874 - protein, 5 aa, synthetic construct
RIHMR

SEQ ID NO: 875 - protein, 5 aa, synthetic construct
KHCNK

SEQ ID NO: 876 - protein, 5 aa, synthetic construct
KETAR

SEQ ID NO: 877 - protein, 5 aa, synthetic construct
RFSMR

SEQ ID NO: 878 - protein, 5 aa, synthetic construct
KHTER

SEQ ID NO: 879 - protein, 5 aa, synthetic construct
KDCMK

SEQ ID NO: 880 - protein, 5 aa, synthetic construct
RCDKK

SEQ ID NO: 881 - protein, 5 aa, synthetic construct
RNDAK

SEQ ID NO: 882 - protein, 5 aa, synthetic construct
REEGR

SEQ ID NO: 883 - protein, 5 aa, synthetic construct
KMSAK

SEQ ID NO: 884 - protein, 5 aa, synthetic construct
KIWEK

SEQ ID NO: 885 - protein, 5 aa, synthetic construct
RHCNR

SEQ ID NO: 886 - protein, 5 aa, synthetic construct
RMMFR

SEQ ID NO: 887 - protein, 5 aa, synthetic construct
KTPVR

SEQ ID NO: 888 - protein, 5 aa, synthetic construct
KKCIR

SEQ ID NO: 889 - protein, 5 aa, synthetic construct
KTPGR

SEQ ID NO: 890 - protein, 5 aa, synthetic construct
KKHFK

SEQ ID NO: 891 - protein, 5 aa, synthetic construct
RKKMK

SEQ ID NO: 892 - protein, 5 aa, synthetic construct
RKPMR

SEQ ID NO: 893 - protein, 5 aa, synthetic construct
RIKIK

SEQ ID NO: 894 - protein, 5 aa, synthetic construct
KMSPR

SEQ ID NO: 895 - protein, 5 aa, synthetic construct
RFTKK

SEQ ID NO: 896 - protein, 5 aa, synthetic construct
RYHWR

SEQ ID NO: 897 - protein, 5 aa, synthetic construct
KFCER

SEQ ID NO: 898 - protein, 5 aa, synthetic construct
RYCMR

SEQ ID NO: 899 - protein, 5 aa, synthetic construct
RYTFR

SEQ ID NO: 900 - protein, 5 aa, synthetic construct
RHSVK

SEQ ID NO: 901 - protein, 5 aa, synthetic construct
KCTNR

SEQ ID NO: 902 - protein, 5 aa, synthetic construct
REDPK

SEQ ID NO: 903 - protein, 5 aa, synthetic construct
RHHKR

SEQ ID NO: 904 - protein, 5 aa, synthetic construct
KPDPK

SEQ ID NO: 905 - protein, 5 aa, synthetic construct
RPSPR

SEQ ID NO: 906 - protein, 5 aa, synthetic construct
RKHAK

SEQ ID NO: 907 - protein, 5 aa, synthetic construct
KDSVR

SEQ ID NO: 908 - protein, 5 aa, synthetic construct
RCHFK

SEQ ID NO: 909 - protein, 5 aa, synthetic construct
RINVK

SEQ ID NO: 910 - protein, 5 aa, synthetic construct
RPCFR

SEQ ID NO: 911 - protein, 5 aa, synthetic construct
REHGK

SEQ ID NO: 912 - protein, 5 aa, synthetic construct
KKMGR

SEQ ID NO: 913 - protein, 5 aa, synthetic construct
KHTFK

SEQ ID NO: 914 - protein, 5 aa, synthetic construct
RPTMR

SEQ ID NO: 915 - protein, 5 aa, synthetic construct
KMTHR

SEQ ID NO: 916 - protein, 5 aa, synthetic construct
RCHER

SEQ ID NO: 917 - protein, 5 aa, synthetic construct
KCAPR

SEQ ID NO: 918 - protein, 5 aa, synthetic construct
RNNVR

SEQ ID NO: 919 - protein, 5 aa, synthetic construct
KNNIK

SEQ ID NO: 920 - protein, 5 aa, synthetic construct
KPKIK

SEQ ID NO: 921 - protein, 5 aa, synthetic construct
KKKFK

SEQ ID NO: 922 - protein, 5 aa, synthetic construct
RMWKR

SEQ ID NO: 923 - protein, 5 aa, synthetic construct
KCWMK

SEQ ID NO: 924 - protein, 5 aa, synthetic construct
RNEKK

SEQ ID NO: 925 - protein, 5 aa, synthetic construct
KDCFK

SEQ ID NO: 926 - protein, 5 aa, synthetic construct
RNCWK

SEQ ID NO: 927 - protein, 5 aa, synthetic construct
RDEDR

SEQ ID NO: 928 - protein, 5 aa, synthetic construct
KHMVR

SEQ ID NO: 929 - protein, 5 aa, synthetic construct
KYTFR

SEQ ID NO: 930 - protein, 5 aa, synthetic construct
RAWVR

SEQ ID NO: 931 - protein, 5 aa, synthetic construct
RITER

SEQ ID NO: 932 - protein, 5 aa, synthetic construct
RTAWK

SEQ ID NO: 933 - protein, 5 aa, synthetic construct
RYMKK

SEQ ID NO: 934 - protein, 5 aa, synthetic construct
KMMMR

SEQ ID NO: 935 - protein, 5 aa, synthetic construct
RETFK

SEQ ID NO: 936 - protein, 5 aa, synthetic construct
RNHKR

SEQ ID NO: 937 - protein, 5 aa, synthetic construct
KASNR

SEQ ID NO: 938 - protein, 5 aa, synthetic construct
RIEFK

SEQ ID NO: 939 - protein, 5 aa, synthetic construct
KMHAR

SEQ ID NO: 940 - protein, 5 aa, synthetic construct
KCMGK

SEQ ID NO: 941 - protein, 5 aa, synthetic construct
KNHHR

SEQ ID NO: 942 - protein, 5 aa, synthetic construct
RPSDR

SEQ ID NO: 943 - protein, 5 aa, synthetic construct
KDKGK

SEQ ID NO: 944 - protein, 5 aa, synthetic construct
RYEFK

SEQ ID NO: 945 - protein, 5 aa, synthetic construct
RYEKR

SEQ ID NO: 946 - protein, 5 aa, synthetic construct
KYPWR

SEQ ID NO: 947 - protein, 5 aa, synthetic construct
KDWIR

SEQ ID NO: 948 - protein, 5 aa, synthetic construct
KDSFK

SEQ ID NO: 949 - protein, 5 aa, synthetic construct
KMKMK

SEQ ID NO: 950 - protein, 5 aa, synthetic construct
KDADR

SEQ ID NO: 951 - protein, 5 aa, synthetic construct
RYMGR

SEQ ID NO: 952 - protein, 5 aa, synthetic construct
KTMHK

SEQ ID NO: 953 - protein, 5 aa, synthetic construct
RKMAR

SEQ ID NO: 954 - protein, 5 aa, synthetic construct
KTEVK

SEQ ID NO: 955 - protein, 5 aa, synthetic construct
KNADK

SEQ ID NO: 956 - protein, 5 aa, synthetic construct
KPTWK

SEQ ID NO: 957 - protein, 5 aa, synthetic construct
RDCER

SEQ ID NO: 958 - protein, 5 aa, synthetic construct
RKWKR

SEQ ID NO: 959 - protein, 5 aa, synthetic construct
KPNMK

SEQ ID NO: 960 - protein, 5 aa, synthetic construct
RNPGK

SEQ ID NO: 961 - protein, 5 aa, synthetic construct
KIANR

SEQ ID NO: 962 - protein, 5 aa, synthetic construct
RIWKR

SEQ ID NO: 963 - protein, 5 aa, synthetic construct
RAPNK

SEQ ID NO: 964 - protein, 5 aa, synthetic construct
KYTDR

SEQ ID NO: 965 - protein, 5 aa, synthetic construct
KMEIR

SEQ ID NO: 966 - protein, 5 aa, synthetic construct
RPSAK

SEQ ID NO: 967 - protein, 5 aa, synthetic construct
KKTHK

SEQ ID NO: 968 - protein, 5 aa, synthetic construct
RIPHR

SEQ ID NO: 969 - protein, 5 aa, synthetic construct
RNTVR

SEQ ID NO: 970 - protein, 5 aa, synthetic construct
KYMNR

SEQ ID NO: 971 - protein, 5 aa, synthetic construct
KMTGK

SEQ ID NO: 972 - protein, 5 aa, synthetic construct
KYAKR

SEQ ID NO: 973 - protein, 5 aa, synthetic construct
RYWAR

SEQ ID NO: 974 - protein, 5 aa, synthetic construct
RHMMR

SEQ ID NO: 975 - protein, 5 aa, synthetic construct
RFAHK

SEQ ID NO: 976 - protein, 5 aa, synthetic construct
RETNR

SEQ ID NO: 977 - protein, 5 aa, synthetic construct
KNMIR

SEQ ID NO: 978 - protein, 5 aa, synthetic construct
RYDHK

SEQ ID NO: 979 - protein, 5 aa, synthetic construct
RHHMK

SEQ ID NO: 980 - protein, 5 aa, synthetic construct
RKPHR

SEQ ID NO: 981 - protein, 5 aa, synthetic construct
KNDKK

SEQ ID NO: 982 - protein, 5 aa, synthetic construct
KFMHK

SEQ ID NO: 983 - protein, 5 aa, synthetic construct
RTTGR

SEQ ID NO: 984 - protein, 5 aa, synthetic construct
KNAHK

SEQ ID NO: 985 - protein, 5 aa, synthetic construct
RDPKR

SEQ ID NO: 986 - protein, 5 aa, synthetic construct
RPMDK

SEQ ID NO: 987 - protein, 5 aa, synthetic construct
RAHWR

SEQ ID NO: 988 - protein, 5 aa, synthetic construct
RCKWR

SEQ ID NO: 989 - protein, 5 aa, synthetic construct
RCTAR

SEQ ID NO: 990 - protein, 5 aa, synthetic construct
KEEPK

SEQ ID NO: 991 - protein, 5 aa, synthetic construct
RPEFR

SEQ ID NO: 992 - protein, 5 aa, synthetic construct
RNDKK

SEQ ID NO: 993 - protein, 5 aa, synthetic construct
KEKFR

SEQ ID NO: 994 - protein, 5 aa, synthetic construct
KAWVR

SEQ ID NO: 995 - protein, 5 aa, synthetic construct
KFTDK

SEQ ID NO: 996 - protein, 5 aa, synthetic construct
RMTKK

SEQ ID NO: 997 - protein, 5 aa, synthetic construct
RYPHR

SEQ ID NO: 998 - protein, 5 aa, synthetic construct
RCTAK

SEQ ID NO: 999 - protein, 5 aa, synthetic construct
KTKFK

SEQ ID NO: 1000 - protein, 5 aa, synthetic construct
KHCWR

SEQ ID NO: 1001 - protein, 5 aa, synthetic construct
KPCGK

SEQ ID NO: 1002 - protein, 5 aa, synthetic construct
KEDNK

SEQ ID NO: 1003 - protein, 5 aa, synthetic construct
RMTVR

SEQ ID NO: 1004 - protein, 5 aa, synthetic construct
RDADR

SEQ ID NO: 1005 - protein, 5 aa, synthetic construct
RTHGR

SEQ ID NO: 1006 - protein, 5 aa, synthetic construct
KEPER

SEQ ID NO: 1007 - protein, 5 aa, synthetic construct
RDMMR

SEQ ID NO: 1008 - protein, 5 aa, synthetic construct
KDSNR

SEQ ID NO: 1009 - protein, 5 aa, synthetic construct
KMCAK

SEQ ID NO: 1010 - protein, 5 aa, synthetic construct
KCDNK

SEQ ID NO: 1011 - protein, 5 aa, synthetic construct
KTDMK

SEQ ID NO: 1012 - protein, 5 aa, synthetic construct
RHKVR

SEQ ID NO: 1013 - protein, 5 aa, synthetic construct
KCCVK

SEQ ID NO: 1014 - protein, 5 aa, synthetic construct
RKNKR

SEQ ID NO: 1015 - protein, 5 aa, synthetic construct
RCWMK

SEQ ID NO: 1016 - protein, 5 aa, synthetic construct
KYTMR

SEQ ID NO: 1017 - protein, 5 aa, synthetic construct
RCTWK

SEQ ID NO: 1018 - protein, 5 aa, synthetic construct
KFWAK

SEQ ID NO: 1019 - protein, 5 aa, synthetic construct
RFKFK

SEQ ID NO: 1020 - protein, 5 aa, synthetic construct
KCKVK

SEQ ID NO: 1021 - protein, 5 aa, synthetic construct
KITHK

SEQ ID NO: 1022 - protein, 5 aa, synthetic construct
KIADK

SEQ ID NO: 1023 - protein, 5 aa, synthetic construct
RYCKK

SEQ ID NO: 1024 - protein, 5 aa, synthetic construct
KIDNK

SEQ ID NO: 1025 - protein, 5 aa, synthetic construct
RHKWK

SEQ ID NO: 1026 - protein, 5 aa, synthetic construct
RNAVR

SEQ ID NO: 1027 - protein, 5 aa, synthetic construct
KNTNR

SEQ ID NO: 1028 - protein, 5 aa, synthetic construct
RMAMR

SEQ ID NO: 1029 - protein, 5 aa, synthetic construct
KADIK

SEQ ID NO: 1030 - protein, 5 aa, synthetic construct
RISDK

SEQ ID NO: 1031 - protein, 5 aa, synthetic construct
RKEER

SEQ ID NO: 1032 - protein, 5 aa, synthetic construct
RHHMR

SEQ ID NO: 1033 - protein, 5 aa, synthetic construct
REWDK

SEQ ID NO: 1034 - protein, 5 aa, synthetic construct
RFAKK

SEQ ID NO: 1035 - protein, 5 aa, synthetic construct
KEHVR

SEQ ID NO: 1036 - protein, 5 aa, synthetic construct
KTHMK

SEQ ID NO: 1037 - protein, 5 aa, synthetic construct
KKSFR

SEQ ID NO: 1038 - protein, 5 aa, synthetic construct
KCCKR

SEQ ID NO: 1039 - protein, 5 aa, synthetic construct
KKDVK

SEQ ID NO: 1040 - protein, 5 aa, synthetic construct
KTPWR

SEQ ID NO: 1041 - protein, 5 aa, synthetic construct
RDWFK

SEQ ID NO: 1042 - protein, 5 aa, synthetic construct
RCCAK

SEQ ID NO: 1043 - protein, 5 aa, synthetic construct
KFEMK

SEQ ID NO: 1044 - protein, 5 aa, synthetic construct
RDCFK

SEQ ID NO: 1045 - protein, 5 aa, synthetic construct
KMDEK

SEQ ID NO: 1046 - protein, 5 aa, synthetic construct
KHTMR

SEQ ID NO: 1047 - protein, 5 aa, synthetic construct
KAHMR

SEQ ID NO: 1048 - protein, 5 aa, synthetic construct
KYDNK

SEQ ID NO: 1049 - protein, 5 aa, synthetic construct
KPPGR

SEQ ID NO: 1050 - protein, 5 aa, synthetic construct
KPEDR

SEQ ID NO: 1051 - protein, 5 aa, synthetic construct
RYAHR

SEQ ID NO: 1052 - protein, 5 aa, synthetic construct
RNDWR

SEQ ID NO: 1053 - protein, 5 aa, synthetic construct
KHEHK

SEQ ID NO: 1054 - protein, 5 aa, synthetic construct
RNKVR

SEQ ID NO: 1055 - protein, 5 aa, synthetic construct
KHHEK

SEQ ID NO: 1056 - protein, 5 aa, synthetic construct
RCTPK

SEQ ID NO: 1057 - protein, 5 aa, synthetic construct
RFDPK

SEQ ID NO: 1058 - protein, 5 aa, synthetic construct
KIPWR

SEQ ID NO: 1059 - protein, 5 aa, synthetic construct
RMAGR

SEQ ID NO: 1060 - protein, 5 aa, synthetic construct
KTHIK

SEQ ID NO: 1061 - protein, 5 aa, synthetic construct
KDSFR

SEQ ID NO: 1062 - protein, 5 aa, synthetic construct
RAPWR

SEQ ID NO: 1063 - protein, 5 aa, synthetic construct
RPHVK

SEQ ID NO: 1064 - protein, 5 aa, synthetic construct
KCMKR

SEQ ID NO: 1065 - protein, 5 aa, synthetic construct
KNPIR

SEQ ID NO: 1066 - protein, 5 aa, synthetic construct
RFWVK

SEQ ID NO: 1067 - protein, 5 aa, synthetic construct
KHENK

SEQ ID NO: 1068 - protein, 5 aa, synthetic construct
RMHKK

SEQ ID NO: 1069 - protein, 5 aa, synthetic construct
RPSFK

SEQ ID NO: 1070 - protein, 5 aa, synthetic construct
RETGK

SEQ ID NO: 1071 - protein, 5 aa, synthetic construct
RYEGR

SEQ ID NO: 1072 - protein, 5 aa, synthetic construct
KDWPK

SEQ ID NO: 1073 - protein, 5 aa, synthetic construct
RDEAK

SEQ ID NO: 1074 - protein, 5 aa, synthetic construct
RPCPR

SEQ ID NO: 1075 - protein, 5 aa, synthetic construct
RKHIK

SEQ ID NO: 1076 - protein, 5 aa, synthetic construct
KFEKK

SEQ ID NO: 1077 - protein, 5 aa, synthetic construct
KADMK

SEQ ID NO: 1078 - protein, 5 aa, synthetic construct
KEAWK

SEQ ID NO: 1079 - protein, 5 aa, synthetic construct
KYTGR

SEQ ID NO: 1080 - protein, 5 aa, synthetic construct
RYTHK

SEQ ID NO: 1081 - protein, 5 aa, synthetic construct
RPNVR

SEQ ID NO: 1082 - protein, 5 aa, synthetic construct
RACFR

SEQ ID NO: 1083 - protein, 5 aa, synthetic construct
KFSVR

SEQ ID NO: 1084 - protein, 5 aa, synthetic construct
RTHDR

SEQ ID NO: 1085 - protein, 5 aa, synthetic construct
RTTER

SEQ ID NO: 1086 - protein, 5 aa, synthetic construct
RIWDR

SEQ ID NO: 1087 - protein, 5 aa, synthetic construct
KKKKR

SEQ ID NO: 1088 - protein, 5 aa, synthetic construct
KAKKK

SEQ ID NO: 1089 - protein, 5 aa, synthetic construct
KTHHR

SEQ ID NO: 1090 - protein, 5 aa, synthetic construct
KISGK

SEQ ID NO: 1091 - protein, 5 aa, synthetic construct
KTEHR

SEQ ID NO: 1092 - protein, 5 aa, synthetic construct
KPMVK

SEQ ID NO: 1093 - protein, 5 aa, synthetic construct
REEDK

SEQ ID NO: 1094 - protein, 5 aa, synthetic construct
RYSMK

SEQ ID NO: 1095 - protein, 5 aa, synthetic construct
KAEKR

SEQ ID NO: 1096 - protein, 5 aa, synthetic construct
RPTDK

SEQ ID NO: 1097 - protein, 5 aa, synthetic construct
KPDIR

SEQ ID NO: 1098 - protein, 5 aa, synthetic construct
RFHGR

SEQ ID NO: 1099 - protein, 5 aa, synthetic construct
RATAR

SEQ ID NO: 1100 - protein, 5 aa, synthetic construct
RPWKR

SEQ ID NO: 1101 - protein, 5 aa, synthetic construct
KYKNR

SEQ ID NO: 1102 - protein, 5 aa, synthetic construct
KTHKK

SEQ ID NO: 1103 - protein, 5 aa, synthetic construct
KKSHR

SEQ ID NO: 1104 - protein, 5 aa, synthetic construct
RETHK

SEQ ID NO: 1105 - protein, 5 aa, synthetic construct
RPTKR

SEQ ID NO: 1106 - protein, 5 aa, synthetic construct
RYTER

SEQ ID NO: 1107 - protein, 5 aa, synthetic construct
RPWHK

SEQ ID NO: 1108 - protein, 5 aa, synthetic construct
RNPIR

SEQ ID NO: 1109 - protein, 5 aa, synthetic construct
KCHPK

SEQ ID NO: 1110 - protein, 5 aa, synthetic construct
RMHMK

SEQ ID NO: 1111 - protein, 5 aa, synthetic construct
KAEHK

SEQ ID NO: 1112 - protein, 5 aa, synthetic construct
RTTFK

SEQ ID NO: 1113 - protein, 5 aa, synthetic construct
RHMER

SEQ ID NO: 1114 - protein, 5 aa, synthetic construct
RKTFR

SEQ ID NO: 1115 - protein, 5 aa, synthetic construct
KEPEK

SEQ ID NO: 1116 - protein, 5 aa, synthetic construct
KECFR

SEQ ID NO: 1117 - protein, 5 aa, synthetic construct
RHKIR

SEQ ID NO: 1118 - protein, 5 aa, synthetic construct
RMDAR

SEQ ID NO: 1119 - protein, 5 aa, synthetic construct
KMNIK

SEQ ID NO: 1120 - protein, 5 aa, synthetic construct
RPPDR

SEQ ID NO: 1121 - protein, 5 aa, synthetic construct
RFKVK

SEQ ID NO: 1122 - protein, 5 aa, synthetic construct
RNTDR

SEQ ID NO: 1123 - protein, 5 aa, synthetic construct
KYEKR

SEQ ID NO: 1124 - protein, 5 aa, synthetic construct
KKPVK

SEQ ID NO: 1125 - protein, 5 aa, synthetic construct
RYPFK

SEQ ID NO: 1126 - protein, 5 aa, synthetic construct
KPTHK

SEQ ID NO: 1127 - protein, 5 aa, synthetic construct
RIADR

SEQ ID NO: 1128 - protein, 5 aa, synthetic construct
REWVR

SEQ ID NO: 1129 - protein, 5 aa, synthetic construct
KFDAR

SEQ ID NO: 1130 - protein, 5 aa, synthetic construct
RFMVR

SEQ ID NO: 1131 - protein, 5 aa, synthetic construct
KCDGK

SEQ ID NO: 1132 - protein, 5 aa, synthetic construct
KFSMK

SEQ ID NO: 1133 - protein, 5 aa, synthetic construct
KCSMK

SEQ ID NO: 1134 - protein, 5 aa, synthetic construct
RTCKR

SEQ ID NO: 1135 - protein, 5 aa, synthetic construct
RHTAR

SEQ ID NO: 1136 - protein, 5 aa, synthetic construct
KNSAR

SEQ ID NO: 1137 - protein, 5 aa, synthetic construct
KEEEK

SEQ ID NO: 1138 - protein, 5 aa, synthetic construct
RENHK

SEQ ID NO: 1139 - protein, 5 aa, synthetic construct
KHCWK

SEQ ID NO: 1140 - protein, 5 aa, synthetic construct
RNEFK

SEQ ID NO: 1141 - protein, 5 aa, synthetic construct
REEVR

SEQ ID NO: 1142 - protein, 5 aa, synthetic construct
KTENK

SEQ ID NO: 1143 - protein, 5 aa, synthetic construct
RATGK

SEQ ID NO: 1144 - protein, 5 aa, synthetic construct
KAKNR

SEQ ID NO: 1145 - protein, 5 aa, synthetic construct
RMPAK

SEQ ID NO: 1146 - protein, 5 aa, synthetic construct
KPHGR

SEQ ID NO: 1147 - protein, 5 aa, synthetic construct
RDTGK

SEQ ID NO: 1148 - protein, 5 aa, synthetic construct
RDWFR

SEQ ID NO: 1149 - protein, 5 aa, synthetic construct
KETDR

SEQ ID NO: 1150 - protein, 5 aa, synthetic construct
KFTNR

SEQ ID NO: 1151 - protein, 5 aa, synthetic construct
KTNAR

SEQ ID NO: 1152 - protein, 5 aa, synthetic construct
KENFK

SEQ ID NO: 1153 - protein, 5 aa, synthetic construct
RDAPR

SEQ ID NO: 1154 - protein, 5 aa, synthetic construct
KCWVR

SEQ ID NO: 1155 - protein, 5 aa, synthetic construct
RYDMK

SEQ ID NO: 1156 - protein, 5 aa, synthetic construct
KKMNK

SEQ ID NO: 1157 - protein, 5 aa, synthetic construct
KTSHR

SEQ ID NO: 1158 - protein, 5 aa, synthetic construct
KYNPR

SEQ ID NO: 1159 - protein, 5 aa, synthetic construct
KKWKK

SEQ ID NO: 1160 - protein, 5 aa, synthetic construct
KETWR

SEQ ID NO: 1161 - protein, 5 aa, synthetic construct
KCHDR

SEQ ID NO: 1162 - protein, 5 aa, synthetic construct
KIKKK

SEQ ID NO: 1163 - protein, 5 aa, synthetic construct
KKSKR

SEQ ID NO: 1164 - protein, 5 aa, synthetic construct
RFPWR

SEQ ID NO: 1165 - protein, 5 aa, synthetic construct
RNMNR

SEQ ID NO: 1166 - protein, 5 aa, synthetic construct
KTHEK

SEQ ID NO: 1167 - protein, 5 aa, synthetic construct
KESWK

SEQ ID NO: 1168 - protein, 5 aa, synthetic construct
RHHWR

SEQ ID NO: 1169 - protein, 5 aa, synthetic construct
KDTPK

SEQ ID NO: 1170 - protein, 5 aa, synthetic construct
KHSEK

SEQ ID NO: 1171 - protein, 5 aa, synthetic construct
RCSWK

SEQ ID NO: 1172 - protein, 5 aa, synthetic construct
KIWWR

SEQ ID NO: 1173 - protein, 5 aa, synthetic construct
KECKR

SEQ ID NO: 1174 - protein, 5 aa, synthetic construct
KYSGK

SEQ ID NO: 1175 - protein, 5 aa, synthetic construct
RDMIR

SEQ ID NO: 1176 - protein, 5 aa, synthetic construct
KIHFK

SEQ ID NO: 1177 - protein, 5 aa, synthetic construct
KIPVR

SEQ ID NO: 1178 - protein, 5 aa, synthetic construct
RFDNR

SEQ ID NO: 1179 - protein, 5 aa, synthetic construct
RMNVR

SEQ ID NO: 1180 - protein, 5 aa, synthetic construct
KETAK

SEQ ID NO: 1181 - protein, 5 aa, synthetic construct
KKAKR

SEQ ID NO: 1182 - protein, 5 aa, synthetic construct
REKWK

SEQ ID NO: 1183 - protein, 5 aa, synthetic construct
RHAPK

SEQ ID NO: 1184 - protein, 5 aa, synthetic construct
RDSMK

SEQ ID NO: 1185 - protein, 5 aa, synthetic construct
KPTGR

SEQ ID NO: 1186 - protein, 5 aa, synthetic construct
KMWVK

SEQ ID NO: 1187 - protein, 5 aa, synthetic construct
KHHIR

SEQ ID NO: 1188 - protein, 5 aa, synthetic construct
KPSGK

SEQ ID NO: 1189 - protein, 5 aa, synthetic construct
RKMDK

SEQ ID NO: 1190 - protein, 5 aa, synthetic construct
RFSEK

SEQ ID NO: 1191 - protein, 5 aa, synthetic construct
RMDWK

SEQ ID NO: 1192 - protein, 5 aa, synthetic construct
RYAKK

SEQ ID NO: 1193 - protein, 5 aa, synthetic construct
KHWFK

SEQ ID NO: 1194 - protein, 5 aa, synthetic construct
RDNGK

SEQ ID NO: 1195 - protein, 5 aa, synthetic construct
RHWEK

SEQ ID NO: 1196 - protein, 5 aa, synthetic construct
RICIR

SEQ ID NO: 1197 - protein, 5 aa, synthetic construct
KDDAR

SEQ ID NO: 1198 - protein, 5 aa, synthetic construct
RAADK

SEQ ID NO: 1199 - protein, 5 aa, synthetic construct
KNNNR

SEQ ID NO: 1200 - protein, 5 aa, synthetic construct
RKNEK

SEQ ID NO: 1201 - protein, 6 aa, synthetic construct
KKVISK

SEQ ID NO: 1202 - protein, 6 aa, synthetic construct
RKQILR

SEQ ID NO: 1203 - protein, 6 aa, synthetic construct
RKRRSR

SEQ ID NO: 1204 - protein, 6 aa, synthetic construct
RKSFYK

SEQ ID NO: 1205 - protein, 6 aa, synthetic construct
KRQIRK

SEQ ID NO: 1206 - protein, 6 aa, synthetic construct
RKSRCK

SEQ ID NO: 1207 - protein, 6 aa, synthetic construct
KRQYSK

SEQ ID NO: 1208 - protein, 6 aa, synthetic construct
RKRRRK

SEQ ID NO: 1209 - protein, 6 aa, synthetic construct
RKSFCK

SEQ ID NO: 1210 - protein, 6 aa, synthetic construct
KRWRLK

SEQ ID NO: 1211 - protein, 6 aa, synthetic construct
KRQFTK

SEQ ID NO: 1212 - protein, 6 aa, synthetic construct
KKQICK

SEQ ID NO: 1213 - protein, 6 aa, synthetic construct
KRQIQR

SEQ ID NO: 1214 - protein, 6 aa, synthetic construct
RKRFLK

SEQ ID NO: 1215 - protein, 6 aa, synthetic construct
KRQICK

SEQ ID NO: 1216 - protein, 6 aa, synthetic construct
KKQYCR

SEQ ID NO: 1217 - protein, 6 aa, synthetic construct
KRVQCR

SEQ ID NO: 1218 - protein, 6 aa, synthetic construct
KKQFTR

SEQ ID NO: 1219 - protein, 6 aa, synthetic construct
KRSFYR

SEQ ID NO: 1220 - protein, 6 aa, synthetic construct
KKSRYK

SEQ ID NO: 1221 - protein, 6 aa, synthetic construct
RKWYLK

SEQ ID NO: 1222 - protein, 6 aa, synthetic construct
RKRLCK

SEQ ID NO: 1223 - protein, 6 aa, synthetic construct
KRSVSR

SEQ ID NO: 1224 - protein, 6 aa, synthetic construct
RKVIRK

SEQ ID NO: 1225 - protein, 6 aa, synthetic construct
KKLIRR

SEQ ID NO: 1226 - protein, 6 aa, synthetic construct
KKRVLR

SEQ ID NO: 1227 - protein, 6 aa, synthetic construct
KRSFTK

SEQ ID NO: 1228 - protein, 6 aa, synthetic construct
RRWISK

SEQ ID NO: 1229 - protein, 6 aa, synthetic construct
KRLISR

SEQ ID NO: 1230 - protein, 6 aa, synthetic construct
RRQVRR

SEQ ID NO: 1231 - protein, 6 aa, synthetic construct
KRLYCR

SEQ ID NO: 1232 - protein, 6 aa, synthetic construct
RKGQCR

SEQ ID NO: 1233 - protein, 6 aa, synthetic construct
KKSYCR

SEQ ID NO: 1234 - protein, 6 aa, synthetic construct
RKWLYK

SEQ ID NO: 1235 - protein, 6 aa, synthetic construct
RRGRQR

SEQ ID NO: 1236 - protein, 6 aa, synthetic construct
RKWQQK

SEQ ID NO: 1237 - protein, 6 aa, synthetic construct
KKWVLR

SEQ ID NO: 1238 - protein, 6 aa, synthetic construct
RRQQTK

SEQ ID NO: 1239 - protein, 6 aa, synthetic construct
RKVYQK

SEQ ID NO: 1240 - protein, 6 aa, synthetic construct
KRSQYK

SEQ ID NO: 1241 - protein, 6 aa, synthetic construct
RKGITK

SEQ ID NO: 1242 - protein, 6 aa, synthetic construct
KKRIQR

SEQ ID NO: 1243 - protein, 6 aa, synthetic construct
RKRIRR

SEQ ID NO: 1244 - protein, 6 aa, synthetic construct
KRQYCK

SEQ ID NO: 1245 - protein, 6 aa, synthetic construct
RKGLTK

SEQ ID NO: 1246 - protein, 6 aa, synthetic construct
KRLYQR

SEQ ID NO: 1247 - protein, 6 aa, synthetic construct
KRRLLK

SEQ ID NO: 1248 - protein, 6 aa, synthetic construct
RRWVRR

SEQ ID NO: 1249 - protein, 6 aa, synthetic construct
RRWQTR

SEQ ID NO: 1250 - protein, 6 aa, synthetic construct
KKVRTR

SEQ ID NO: 1251 - protein, 6 aa, synthetic construct
RRVLYK

SEQ ID NO: 1252 - protein, 6 aa, synthetic construct
RRRFLR

SEQ ID NO: 1253 - protein, 6 aa, synthetic construct
KRVIQR

SEQ ID NO: 1254 - protein, 6 aa, synthetic construct
RRRVCK

SEQ ID NO: 1255 - protein, 6 aa, synthetic construct
KRSIYR

SEQ ID NO: 1256 - protein, 6 aa, synthetic construct
RRGIQR

SEQ ID NO: 1257 - protein, 6 aa, synthetic construct
RKQYYK

SEQ ID NO: 1258 - protein, 6 aa, synthetic construct
RKSVTR

SEQ ID NO: 1259 - protein, 6 aa, synthetic construct
KRLQCK

SEQ ID NO: 1260 - protein, 6 aa, synthetic construct
RKSIQK

SEQ ID NO: 1261 - protein, 6 aa, synthetic construct
KRSYCK

SEQ ID NO: 1262 - protein, 6 aa, synthetic construct
RRWFTK

SEQ ID NO: 1263 - protein, 6 aa, synthetic construct
KKWVSR

SEQ ID NO: 1264 - protein, 6 aa, synthetic construct
RKQFTK

SEQ ID NO: 1265 - protein, 6 aa, synthetic construct
KKSRRR

SEQ ID NO: 1266 - protein, 6 aa, synthetic construct
KKSISR

SEQ ID NO: 1267 - protein, 6 aa, synthetic construct
RRSYTR

SEQ ID NO: 1268 - protein, 6 aa, synthetic construct
RKLQLK

SEQ ID NO: 1269 - protein, 6 aa, synthetic construct
RKVRRR

SEQ ID NO: 1270 - protein, 6 aa, synthetic construct
KKLLYR

SEQ ID NO: 1271 - protein, 6 aa, synthetic construct
KRWFYK

SEQ ID NO: 1272 - protein, 6 aa, synthetic construct
RKVQLK

SEQ ID NO: 1273 - protein, 6 aa, synthetic construct
KKQQQR

SEQ ID NO: 1274 - protein, 6 aa, synthetic construct
KKVRLR

SEQ ID NO: 1275 - protein, 6 aa, synthetic construct
RRQYQK

SEQ ID NO: 1276 - protein, 6 aa, synthetic construct
RRLQLK

SEQ ID NO: 1277 - protein, 6 aa, synthetic construct
KKQLRR

SEQ ID NO: 1278 - protein, 6 aa, synthetic construct
KKRVSK

SEQ ID NO: 1279 - protein, 6 aa, synthetic construct
KRLFCK

SEQ ID NO: 1280 - protein, 6 aa, synthetic construct
KRVQQR

SEQ ID NO: 1281 - protein, 6 aa, synthetic construct
RRWQLR

SEQ ID NO: 1282 - protein, 6 aa, synthetic construct
KKVLYR

SEQ ID NO: 1283 - protein, 6 aa, synthetic construct
RRSFLR

SEQ ID NO: 1284 - protein, 6 aa, synthetic construct
RRGQTK

SEQ ID NO: 1285 - protein, 6 aa, synthetic construct
RKRQCK

SEQ ID NO: 1286 - protein, 6 aa, synthetic construct
KKWRQK

SEQ ID NO: 1287 - protein, 6 aa, synthetic construct
KKQVYK

SEQ ID NO: 1288 - protein, 6 aa, synthetic construct
KRWICK

SEQ ID NO: 1289 - protein, 6 aa, synthetic construct
RKQRCK

SEQ ID NO: 1290 - protein, 6 aa, synthetic construct
KKGISK

SEQ ID NO: 1291 - protein, 6 aa, synthetic construct
RKQQCK

SEQ ID NO: 1292 - protein, 6 aa, synthetic construct
RRWRLK

SEQ ID NO: 1293 - protein, 6 aa, synthetic construct
KRWIRR

SEQ ID NO: 1294 - protein, 6 aa, synthetic construct
RKVQQK

SEQ ID NO: 1295 - protein, 6 aa, synthetic construct
KKWQTK

SEQ ID NO: 1296 - protein, 6 aa, synthetic construct
KRGVRK

SEQ ID NO: 1297 - protein, 6 aa, synthetic construct
KKVYLR

SEQ ID NO: 1298 - protein, 6 aa, synthetic construct
KRLQCR

SEQ ID NO: 1299 - protein, 6 aa, synthetic construct
RKVVYR

SEQ ID NO: 1300 - protein, 6 aa, synthetic construct
RKWISK

SEQ ID NO: 1301 - protein, 6 aa, synthetic construct
KRWLYR

SEQ ID NO: 1302 - protein, 6 aa, synthetic construct
RRRYRR

SEQ ID NO: 1303 - protein, 6 aa, synthetic construct
RKRICK

SEQ ID NO: 1304 - protein, 6 aa, synthetic construct
KRGFSK

SEQ ID NO: 1305 - protein, 6 aa, synthetic construct
KKSISK

SEQ ID NO: 1306 - protein, 6 aa, synthetic construct
KRGQLK

SEQ ID NO: 1307 - protein, 6 aa, synthetic construct
KKQRSR

SEQ ID NO: 1308 - protein, 6 aa, synthetic construct
RRLLLR

SEQ ID NO: 1309 - protein, 6 aa, synthetic construct
KKRYLR

SEQ ID NO: 1310 - protein, 6 aa, synthetic construct
KRQLLK

SEQ ID NO: 1311 - protein, 6 aa, synthetic construct
RKVICR

SEQ ID NO: 1312 - protein, 6 aa, synthetic construct
KKWVCR

SEQ ID NO: 1313 - protein, 6 aa, synthetic construct
KRGVQK

SEQ ID NO: 1314 - protein, 6 aa, synthetic construct
RRQITK

SEQ ID NO: 1315 - protein, 6 aa, synthetic construct
RRSLSR

SEQ ID NO: 1316 - protein, 6 aa, synthetic construct
RKVRCK

SEQ ID NO: 1317 - protein, 6 aa, synthetic construct
KRLFTR

SEQ ID NO: 1318 - protein, 6 aa, synthetic construct
RKLQLR

SEQ ID NO: 1319 - protein, 6 aa, synthetic construct
KRLQTR

SEQ ID NO: 1320 - protein, 6 aa, synthetic construct
RRRYSR

SEQ ID NO: 1321 - protein, 6 aa, synthetic construct
KRRYTK

SEQ ID NO: 1322 - protein, 6 aa, synthetic construct
KKLIRK

SEQ ID NO: 1323 - protein, 6 aa, synthetic construct
RRGVQK

SEQ ID NO: 1324 - protein, 6 aa, synthetic construct
KRVQQK

SEQ ID NO: 1325 - protein, 6 aa, synthetic construct
KRRLCR

SEQ ID NO: 1326 - protein, 6 aa, synthetic construct
KKWIQR

SEQ ID NO: 1327 - protein, 6 aa, synthetic construct
KRVIYR

SEQ ID NO: 1328 - protein, 6 aa, synthetic construct
RKQFYR

SEQ ID NO: 1329 - protein, 6 aa, synthetic construct
RRRQSK

SEQ ID NO: 1330 - protein, 6 aa, synthetic construct
RKQVLR

SEQ ID NO: 1331 - protein, 6 aa, synthetic construct
KRGIQR

SEQ ID NO: 1332 - protein, 6 aa, synthetic construct
RRQVYR

SEQ ID NO: 1333 - protein, 6 aa, synthetic construct
RKRFLR

SEQ ID NO: 1334 - protein, 6 aa, synthetic construct
KKSIYR

SEQ ID NO: 1335 - protein, 6 aa, synthetic construct
KRQVSR

SEQ ID NO: 1336 - protein, 6 aa, synthetic construct
RRWLYK

SEQ ID NO: 1337 - protein, 6 aa, synthetic construct
RRLFRR

SEQ ID NO: 1338 - protein, 6 aa, synthetic construct
RKVVTR

SEQ ID NO: 1339 - protein, 6 aa, synthetic construct
KRRFLR

SEQ ID NO: 1340 - protein, 6 aa, synthetic construct
KRQVQR

SEQ ID NO: 1341 - protein, 6 aa, synthetic construct
RKLYQK

SEQ ID NO: 1342 - protein, 6 aa, synthetic construct
KKVYYK

SEQ ID NO: 1343 - protein, 6 aa, synthetic construct
KRGVLR

SEQ ID NO: 1344 - protein, 6 aa, synthetic construct
RKRYTR

SEQ ID NO: 1345 - protein, 6 aa, synthetic construct
RKVFQR

SEQ ID NO: 1346 - protein, 6 aa, synthetic construct
KRGRRR

SEQ ID NO: 1347 - protein, 6 aa, synthetic construct
KKQIQR

SEQ ID NO: 1348 - protein, 6 aa, synthetic construct
RKLRCR

SEQ ID NO: 1349 - protein, 6 aa, synthetic construct
RRWVCK

SEQ ID NO: 1350 - protein, 6 aa, synthetic construct
RKRQCR

SEQ ID NO: 1351 - protein, 6 aa, synthetic construct
KRGVRR

SEQ ID NO: 1352 - protein, 6 aa, synthetic construct
KRVIRR

SEQ ID NO: 1353 - protein, 6 aa, synthetic construct
KKWQQR

SEQ ID NO: 1354 - protein, 6 aa, synthetic construct
KKLYSR

SEQ ID NO: 1355 - protein, 6 aa, synthetic construct
RRVRSR

SEQ ID NO: 1356 - protein, 6 aa, synthetic construct
RRSVTK

SEQ ID NO: 1357 - protein, 6 aa, synthetic construct
KKSLLR

SEQ ID NO: 1358 - protein, 6 aa, synthetic construct
RRLIYR

SEQ ID NO: 1359 - protein, 6 aa, synthetic construct
KRLRRK

SEQ ID NO: 1360 - protein, 6 aa, synthetic construct
RRVIQR

SEQ ID NO: 1361 - protein, 6 aa, synthetic construct
KRRYCK

SEQ ID NO: 1362 - protein, 6 aa, synthetic construct
KKSLSK

SEQ ID NO: 1363 - protein, 6 aa, synthetic construct
KRLQTK

SEQ ID NO: 1364 - protein, 6 aa, synthetic construct
KRGQYK

SEQ ID NO: 1365 - protein, 6 aa, synthetic construct
KKWFTK

SEQ ID NO: 1366 - protein, 6 aa, synthetic construct
RRWYSK

SEQ ID NO: 1367 - protein, 6 aa, synthetic construct
RRRYQR

SEQ ID NO: 1368 - protein, 6 aa, synthetic construct
KRWFCK

SEQ ID NO: 1369 - protein, 6 aa, synthetic construct
RRQQSK

SEQ ID NO: 1370 - protein, 6 aa, synthetic construct
RKSFYR

SEQ ID NO: 1371 - protein, 6 aa, synthetic construct
RKQFQK

SEQ ID NO: 1372 - protein, 6 aa, synthetic construct
RRLIRK

SEQ ID NO: 1373 - protein, 6 aa, synthetic construct
RKQYYR

SEQ ID NO: 1374 - protein, 6 aa, synthetic construct
KKGVCR

SEQ ID NO: 1375 - protein, 6 aa, synthetic construct
RRRIQK

SEQ ID NO: 1376 - protein, 6 aa, synthetic construct
KKVYCK

SEQ ID NO: 1377 - protein, 6 aa, synthetic construct
KRGYRR

SEQ ID NO: 1378 - protein, 6 aa, synthetic construct
RKRYQK

SEQ ID NO: 1379 - protein, 6 aa, synthetic construct
KRSQYR

SEQ ID NO: 1380 - protein, 6 aa, synthetic construct
RKLVRK

SEQ ID NO: 1381 - protein, 6 aa, synthetic construct
KKGVLR

SEQ ID NO: 1382 - protein, 6 aa, synthetic construct
KRGICK

SEQ ID NO: 1383 - protein, 6 aa, synthetic construct
KKGQTR

SEQ ID NO: 1384 - protein, 6 aa, synthetic construct
KRQICR

SEQ ID NO: 1385 - protein, 6 aa, synthetic construct
KRQLRK

SEQ ID NO: 1386 - protein, 6 aa, synthetic construct
RRRVYK

SEQ ID NO: 1387 - protein, 6 aa, synthetic construct
RKLFYK

SEQ ID NO: 1388 - protein, 6 aa, synthetic construct
RKSLQK

SEQ ID NO: 1389 - protein, 6 aa, synthetic construct
KKSYSK

SEQ ID NO: 1390 - protein, 6 aa, synthetic construct
RKLYYR

SEQ ID NO: 1391 - protein, 6 aa, synthetic construct
KKQILK

SEQ ID NO: 1392 - protein, 6 aa, synthetic construct
KRQYQR

SEQ ID NO: 1393 - protein, 6 aa, synthetic construct
KRVQLK

SEQ ID NO: 1394 - protein, 6 aa, synthetic construct
RKWQRR

SEQ ID NO: 1395 - protein, 6 aa, synthetic construct
KRGISR

SEQ ID NO: 1396 - protein, 6 aa, synthetic construct
RKWRRK

SEQ ID NO: 1397 - protein, 6 aa, synthetic construct
RRSIRR

SEQ ID NO: 1398 - protein, 6 aa, synthetic construct
KRLFCR

SEQ ID NO: 1399 - protein, 6 aa, synthetic construct
KKQVQK

SEQ ID NO: 1400 - protein, 6 aa, synthetic construct
RKLYQR

SEQ ID NO: 1401 - protein, 6 aa, synthetic construct
RRRIQR

SEQ ID NO: 1402 - protein, 6 aa, synthetic construct
RRQLTK

SEQ ID NO: 1403 - protein, 6 aa, synthetic construct
RRQITR

SEQ ID NO: 1404 - protein, 6 aa, synthetic construct
KKRQRR

SEQ ID NO: 1405 - protein, 6 aa, synthetic construct
KRWRLR

SEQ ID NO: 1406 - protein, 6 aa, synthetic construct
RRLQTR

SEQ ID NO: 1407 - protein, 6 aa, synthetic construct
KKSQQR

SEQ ID NO: 1408 - protein, 6 aa, synthetic construct
KRSIQR

SEQ ID NO: 1409 - protein, 6 aa, synthetic construct
RKGYTR

SEQ ID NO: 1410 - protein, 6 aa, synthetic construct
RRGVRR

SEQ ID NO: 1411 - protein, 6 aa, synthetic construct
KKQLLR

SEQ ID NO: 1412 - protein, 6 aa, synthetic construct
RRRICR

SEQ ID NO: 1413 - protein, 6 aa, synthetic construct
KRRVRK

SEQ ID NO: 1414 - protein, 6 aa, synthetic construct
RRSYCK

SEQ ID NO: 1415 - protein, 6 aa, synthetic construct
RKRYSR

SEQ ID NO: 1416 - protein, 6 aa, synthetic construct
RKSIQR

SEQ ID NO: 1417 - protein, 6 aa, synthetic construct
KRVLQR

SEQ ID NO: 1418 - protein, 6 aa, synthetic construct
KKQVTR

SEQ ID NO: 1419 - protein, 6 aa, synthetic construct
RRLFCR

SEQ ID NO: 1420 - protein, 6 aa, synthetic construct
KRQRQK

SEQ ID NO: 1421 - protein, 6 aa, synthetic construct
KKWFQR

SEQ ID NO: 1422 - protein, 6 aa, synthetic construct
RRRVRR

SEQ ID NO: 1423 - protein, 6 aa, synthetic construct
KKRRRK

SEQ ID NO: 1424 - protein, 6 aa, synthetic construct
KRGFLR

SEQ ID NO: 1425 - protein, 6 aa, synthetic construct
RKLICK

SEQ ID NO: 1426 - protein, 6 aa, synthetic construct
RRWITR

SEQ ID NO: 1427 - protein, 6 aa, synthetic construct
KRLVQK

SEQ ID NO: 1428 - protein, 6 aa, synthetic construct
KRVIYK

SEQ ID NO: 1429 - protein, 6 aa, synthetic construct
RRRLLR

SEQ ID NO: 1430 - protein, 6 aa, synthetic construct
RKGYCK

SEQ ID NO: 1431 - protein, 6 aa, synthetic construct
KRQRTK

SEQ ID NO: 1432 - protein, 6 aa, synthetic construct
RRRICK

SEQ ID NO: 1433 - protein, 6 aa, synthetic construct
KKWQSR

SEQ ID NO: 1434 - protein, 6 aa, synthetic construct
RRGISR

SEQ ID NO: 1435 - protein, 6 aa, synthetic construct
KKRYCR

SEQ ID NO: 1436 - protein, 6 aa, synthetic construct
RKLISR

SEQ ID NO: 1437 - protein, 6 aa, synthetic construct
RKSRYK

SEQ ID NO: 1438 - protein, 6 aa, synthetic construct
KKGQQK

SEQ ID NO: 1439 - protein, 6 aa, synthetic construct
RKVLCR

SEQ ID NO: 1440 - protein, 6 aa, synthetic construct
RRSRRR

SEQ ID NO: 1441 - protein, 6 aa, synthetic construct
RRLYYK

SEQ ID NO: 1442 - protein, 6 aa, synthetic construct
KRQYLK

SEQ ID NO: 1443 - protein, 6 aa, synthetic construct
KKWYLR

SEQ ID NO: 1444 - protein, 6 aa, synthetic construct
RRRVQK

SEQ ID NO: 1445 - protein, 6 aa, synthetic construct
RRGFRR

SEQ ID NO: 1446 - protein, 6 aa, synthetic construct
RRLVSR

SEQ ID NO: 1447 - protein, 6 aa, synthetic construct
KKVRQK

SEQ ID NO: 1448 - protein, 6 aa, synthetic construct
RRLIYK

SEQ ID NO: 1449 - protein, 6 aa, synthetic construct
RKGVSR

SEQ ID NO: 1450 - protein, 6 aa, synthetic construct
RRVICR

SEQ ID NO: 1451 - protein, 6 aa, synthetic construct
RKVQSK

SEQ ID NO: 1452 - protein, 6 aa, synthetic construct
RRWIRR

SEQ ID NO: 1453 - protein, 6 aa, synthetic construct
RRVQLK

SEQ ID NO: 1454 - protein, 6 aa, synthetic construct
RKSLSK

SEQ ID NO: 1455 - protein, 6 aa, synthetic construct
KKGFQK

SEQ ID NO: 1456 - protein, 6 aa, synthetic construct
KRVRTK

SEQ ID NO: 1457 - protein, 6 aa, synthetic construct
RKWVTR

SEQ ID NO: 1458 - protein, 6 aa, synthetic construct
KKLQYK

SEQ ID NO: 1459 - protein, 6 aa, synthetic construct
KRRYRK

SEQ ID NO: 1460 - protein, 6 aa, synthetic construct
RKQRTK

SEQ ID NO: 1461 - protein, 6 aa, synthetic construct
KRWVTR

SEQ ID NO: 1462 - protein, 6 aa, synthetic construct
RKQLQR

SEQ ID NO: 1463 - protein, 6 aa, synthetic construct
RKSYTK

SEQ ID NO: 1464 - protein, 6 aa, synthetic construct
RRQYQR

SEQ ID NO: 1465 - protein, 6 aa, synthetic construct
RKSVCR

SEQ ID NO: 1466 - protein, 6 aa, synthetic construct
KKGRLK

SEQ ID NO: 1467 - protein, 6 aa, synthetic construct
KRRLLR

SEQ ID NO: 1468 - protein, 6 aa, synthetic construct
KRRQSK

SEQ ID NO: 1469 - protein, 6 aa, synthetic construct
RKRRQR

SEQ ID NO: 1470 - protein, 6 aa, synthetic construct
KRGLRR

SEQ ID NO: 1471 - protein, 6 aa, synthetic construct
RRQVSK

SEQ ID NO: 1472 - protein, 6 aa, synthetic construct
KKQVSR

SEQ ID NO: 1473 - protein, 6 aa, synthetic construct
KKQVSK

SEQ ID NO: 1474 - protein, 6 aa, synthetic construct
KRLLYK

SEQ ID NO: 1475 - protein, 6 aa, synthetic construct
RKRVLK

SEQ ID NO: 1476 - protein, 6 aa, unidentified
RRVICK

SEQ ID NO: 1477 - protein, 6 aa, synthetic construct
KKGLCR

SEQ ID NO: 1478 - protein, 6 aa, synthetic construct
KRQQTR

SEQ ID NO: 1479 - protein, 6 aa, synthetic construct
RRLRYR

SEQ ID NO: 1480 - protein, 6 aa, synthetic construct
RKLQCK

SEQ ID NO: 1481 - protein, 6 aa, synthetic construct
KRLLCR

SEQ ID NO: 1482 - protein, 6 aa, synthetic construct
RRRRYR

SEQ ID NO: 1483 - protein, 6 aa, synthetic construct
KKWVQK

SEQ ID NO: 1484 - protein, 6 aa, synthetic construct
KRSRQK

SEQ ID NO: 1485 - protein, 6 aa, synthetic construct
KRWVQR

SEQ ID NO: 1486 - protein, 6 aa, synthetic construct
RKLISK

SEQ ID NO: 1487 - protein, 6 aa, synthetic construct
RKWLTR

SEQ ID NO: 1488 - protein, 6 aa, synthetic construct
KKVQQR

SEQ ID NO: 1489 - protein, 6 aa, synthetic construct
RKRYYR

SEQ ID NO: 1490 - protein, 6 aa, synthetic construct
RKQLTK

SEQ ID NO: 1491 - protein, 6 aa, synthetic construct
KKQIRK

SEQ ID NO: 1492 - protein, 6 aa, synthetic construct
RKWQTK

SEQ ID NO: 1493 - protein, 6 aa, synthetic construct
RKRVCK

SEQ ID NO: 1494 - protein, 6 aa, synthetic construct
KKLYRR

SEQ ID NO: 1495 - protein, 6 aa, synthetic construct
KRQRCR

SEQ ID NO: 1496 - protein, 6 aa, synthetic construct
RKSIRR

SEQ ID NO: 1497 - protein, 6 aa, synthetic construct
RRGFSK

SEQ ID NO: 1498 - protein, 6 aa, synthetic construct
KKLYCK

SEQ ID NO: 1499 - protein, 6 aa, synthetic construct
KRWLSK

SEQ ID NO: 1500 - protein, 6 aa, synthetic construct
RRWQQK

SEQ ID NO: 1501 - protein, 6 aa, synthetic construct
RRSILR

SEQ ID NO: 1502 - protein, 6 aa, synthetic construct
RRGQSR

SEQ ID NO: 1503 - protein, 6 aa, synthetic construct
RKQYCK

SEQ ID NO: 1504 - protein, 6 aa, synthetic construct
RKLYSR

SEQ ID NO: 1505 - protein, 6 aa, synthetic construct
RKWISR

SEQ ID NO: 1506 - protein, 6 aa, synthetic construct
KKLFYR

SEQ ID NO: 1507 - protein, 6 aa, synthetic construct
KRWYRR

SEQ ID NO: 1508 - protein, 6 aa, synthetic construct
KRRITR

SEQ ID NO: 1509 - protein, 6 aa, synthetic construct
KKGICK

SEQ ID NO: 1510 - protein, 6 aa, synthetic construct
RKRQLK

SEQ ID NO: 1511 - protein, 6 aa, synthetic construct
RRGYQK

SEQ ID NO: 1512 - protein, 6 aa, synthetic construct
KKSRQK

SEQ ID NO: 1513 - protein, 6 aa, synthetic construct
RRWFCK

SEQ ID NO: 1514 - protein, 6 aa, synthetic construct
RRRILR

SEQ ID NO: 1515 - protein, 6 aa, synthetic construct
RKQQTK

SEQ ID NO: 1516 - protein, 6 aa, synthetic construct
RKQIRK

SEQ ID NO: 1517 - protein, 6 aa, synthetic construct
KRSFRR

SEQ ID NO: 1518 - protein, 6 aa, synthetic construct
KKSRRK

SEQ ID NO: 1519 - protein, 6 aa, synthetic construct
KRWVQK

SEQ ID NO: 1520 - protein, 6 aa, synthetic construct
KRVQYR

SEQ ID NO: 1521 - protein, 6 aa, synthetic construct
RKQVRR

SEQ ID NO: 1522 - protein, 6 aa, synthetic construct
KRGVQR

SEQ ID NO: 1523 - protein, 6 aa, synthetic construct
RRWLYR

SEQ ID NO: 1524 - protein, 6 aa, synthetic construct
RRLQRR

SEQ ID NO: 1525 - protein, 6 aa, synthetic construct
RRQIQR

SEQ ID NO: 1526 - protein, 6 aa, synthetic construct
RKWIYK

SEQ ID NO: 1527 - protein, 6 aa, synthetic construct
KRGITR

SEQ ID NO: 1528 - protein, 6 aa, synthetic construct
KRWLQK

SEQ ID NO: 1529 - protein, 6 aa, synthetic construct
RKWRQK

SEQ ID NO: 1530 - protein, 6 aa, synthetic construct
RKVQRK

SEQ ID NO: 1531 - protein, 6 aa, synthetic construct
RKRITR

SEQ ID NO: 1532 - protein, 6 aa, synthetic construct
KKRVQK

SEQ ID NO: 1533 - protein, 6 aa, synthetic construct
RKRQSR

SEQ ID NO: 1534 - protein, 6 aa, synthetic construct
RRRRLR

SEQ ID NO: 1535 - protein, 6 aa, synthetic construct
RRSQRR

SEQ ID NO: 1536 - protein, 6 aa, synthetic construct
KRVVTK

SEQ ID NO: 1537 - protein, 6 aa, synthetic construct
RKSRRR

SEQ ID NO: 1538 - protein, 6 aa, synthetic construct
KKQVLK

SEQ ID NO: 1539 - protein, 6 aa, synthetic construct
KKSIQK

SEQ ID NO: 1540 - protein, 6 aa, synthetic construct
KRLLCK

SEQ ID NO: 1541 - protein, 6 aa, synthetic construct
RKQQQR

SEQ ID NO: 1542 - protein, 6 aa, synthetic construct
RKRFCR

SEQ ID NO: 1543 - protein, 6 aa, synthetic construct
KKLYTK

SEQ ID NO: 1544 - protein, 6 aa, synthetic construct
KKSQCR

SEQ ID NO: 1545 - protein, 6 aa, synthetic construct
KKLLCR

SEQ ID NO: 1546 - protein, 6 aa, synthetic construct
KKRIYR

SEQ ID NO: 1547 - protein, 6 aa, synthetic construct
KKQQSK

SEQ ID NO: 1548 - protein, 6 aa, synthetic construct
RKQRLK

SEQ ID NO: 1549 - protein, 6 aa, synthetic construct
KRLYSK

SEQ ID NO: 1550 - protein, 6 aa, synthetic construct
KKLQTK

SEQ ID NO: 1551 - protein, 6 aa, synthetic construct
RRGLRK

SEQ ID NO: 1552 - protein, 6 aa, synthetic construct
RKVFRK

SEQ ID NO: 1553 - protein, 6 aa, synthetic construct
KRLYLK

SEQ ID NO: 1554 - protein, 6 aa, synthetic construct
KKVFLK

SEQ ID NO: 1555 - protein, 6 aa, synthetic construct
RKVFYR

SEQ ID NO: 1556 - protein, 6 aa, synthetic construct
KRGYSK

SEQ ID NO: 1557 - protein, 6 aa, synthetic construct
KRRQTR

SEQ ID NO: 1558 - protein, 6 aa, synthetic construct
KRRYTR

SEQ ID NO: 1559 - protein, 6 aa, synthetic construct
KRQFLR

SEQ ID NO: 1560 - protein, 6 aa, synthetic construct
KRVFLK

SEQ ID NO: 1561 - protein, 6 aa, synthetic construct
RKSVQR

SEQ ID NO: 1562 - protein, 6 aa, synthetic construct
KRVVYK

SEQ ID NO: 1563 - protein, 6 aa, synthetic construct
KRQIRR

SEQ ID NO: 1564 - protein, 6 aa, synthetic construct
RKRQSK

SEQ ID NO: 1565 - protein, 6 aa, synthetic construct
KKRICK

SEQ ID NO: 1566 - protein, 6 aa, synthetic construct
KRWFCR

SEQ ID NO: 1567 - protein, 6 aa, synthetic construct
RKGFSK

SEQ ID NO: 1568 - protein, 6 aa, synthetic construct
RRRFSK

SEQ ID NO: 1569 - protein, 6 aa, synthetic construct
KKWYRK

SEQ ID NO: 1570 - protein, 6 aa, synthetic construct
RKQLYK

SEQ ID NO: 1571 - protein, 6 aa, synthetic construct
KRSLTR

SEQ ID NO: 1572 - protein, 6 aa, synthetic construct
RKLRSK

SEQ ID NO: 1573 - protein, 6 aa, synthetic construct
KRGVLK

SEQ ID NO: 1574 - protein, 6 aa, synthetic construct
KKQFQK

SEQ ID NO: 1575 - protein, 6 aa, synthetic construct
RRVFYR

SEQ ID NO: 1576 - protein, 6 aa, synthetic construct
RRQLRK

SEQ ID NO: 1577 - protein, 6 aa, synthetic construct
KRWITR

SEQ ID NO: 1578 - protein, 6 aa, synthetic construct
KRSLQK

SEQ ID NO: 1579 - protein, 6 aa, synthetic construct
KRRISK

SEQ ID NO: 1580 - protein, 6 aa, synthetic construct
KRLQLR

SEQ ID NO: 1581 - protein, 6 aa, synthetic construct
RKGFYR

SEQ ID NO: 1582 - protein, 6 aa, synthetic construct
KRQYTR

SEQ ID NO: 1583 - protein, 6 aa, synthetic construct
RKRRTK

SEQ ID NO: 1584 - protein, 6 aa, synthetic construct
RKVICK

SEQ ID NO: 1585 - protein, 6 aa, synthetic construct
KRQVLR

SEQ ID NO: 1586 - protein, 6 aa, synthetic construct
RRSYQK

SEQ ID NO: 1587 - protein, 6 aa, synthetic construct
KKGRLR

SEQ ID NO: 1588 - protein, 6 aa, synthetic construct
RRLLQR

SEQ ID NO: 1589 - protein, 6 aa, synthetic construct
RKLFCK

SEQ ID NO: 1590 - protein, 6 aa, synthetic construct
RKLQQR

SEQ ID NO: 1591 - protein, 6 aa, synthetic construct
RRQRCK

SEQ ID NO: 1592 - protein, 6 aa, synthetic construct
RRVQTR

SEQ ID NO: 1593 - protein, 6 aa, synthetic construct
KRLYYK

SEQ ID NO: 1594 - protein, 6 aa, synthetic construct
KKVRRR

SEQ ID NO: 1595 - protein, 6 aa, synthetic construct
KKRQTK

SEQ ID NO: 1596 - protein, 6 aa, synthetic construct
KRQIQK

SEQ ID NO: 1597 - protein, 6 aa, synthetic construct
KRLILR

SEQ ID NO: 1598 - protein, 6 aa, synthetic construct
KKQYYR

SEQ ID NO: 1599 - protein, 6 aa, synthetic construct
KRWILR

SEQ ID NO: 1600 - protein, 6 aa, synthetic construct
KRWQTK

SEQ ID NO: 1601 - protein, 6 aa, synthetic construct
RRLYCR

SEQ ID NO: 1602 - protein, 6 aa, synthetic construct
RRRVLR

SEQ ID NO: 1603 - protein, 6 aa, synthetic construct
KRSQTK

SEQ ID NO: 1604 - protein, 6 aa, synthetic construct
KKQRQK

SEQ ID NO: 1605 - protein, 6 aa, synthetic construct
KKVQTR

SEQ ID NO: 1606 - protein, 6 aa, synthetic construct
RKVLLR

SEQ ID NO: 1607 - protein, 6 aa, synthetic construct
KRLRTR

SEQ ID NO: 1608 - protein, 6 aa, synthetic construct
KRGRSR

SEQ ID NO: 1609 - protein, 6 aa, synthetic construct
RRWISR

SEQ ID NO: 1610 - protein, 6 aa, synthetic construct
KRVLRK

SEQ ID NO: 1611 - protein, 6 aa, synthetic construct
RRQRSR

SEQ ID NO: 1612 - protein, 6 aa, synthetic construct
RKSILK

SEQ ID NO: 1613 - protein, 6 aa, synthetic construct
RKQFCR

SEQ ID NO: 1614 - protein, 6 aa, synthetic construct
KRSFLR

SEQ ID NO: 1615 - protein, 6 aa, synthetic construct
RRGVCR

SEQ ID NO: 1616 - protein, 6 aa, synthetic construct
RKLIYR

SEQ ID NO: 1617 - protein, 6 aa, synthetic construct
RKSVCK

SEQ ID NO: 1618 - protein, 6 aa, synthetic construct
RRQVRK

SEQ ID NO: 1619 - protein, 6 aa, synthetic construct
KRGFYR

SEQ ID NO: 1620 - protein, 6 aa, synthetic construct
KKGQYK

SEQ ID NO: 1621 - protein, 6 aa, synthetic construct
RKVLYR

SEQ ID NO: 1622 - protein, 6 aa, synthetic construct
KRVRQR

SEQ ID NO: 1623 - protein, 6 aa, synthetic construct
RRGYCK

SEQ ID NO: 1624 - protein, 6 aa, synthetic construct
RRRIYR

SEQ ID NO: 1625 - protein, 6 aa, synthetic construct
RKGVQK

SEQ ID NO: 1626 - protein, 6 aa, synthetic construct
KKGQYR

SEQ ID NO: 1627 - protein, 6 aa, synthetic construct
KRWVLR

SEQ ID NO: 1628 - protein, 6 aa, synthetic construct
KRVVLR

SEQ ID NO: 1629 - protein, 6 aa, synthetic construct
RRQRRK

SEQ ID NO: 1630 - protein, 6 aa, synthetic construct
KKQLQK

SEQ ID NO: 1631 - protein, 6 aa, synthetic construct
RRRFRR

SEQ ID NO: 1632 - protein, 6 aa, synthetic construct
RKGIQK

SEQ ID NO: 1633 - protein, 6 aa, synthetic construct
RKQQYR

SEQ ID NO: 1634 - protein, 6 aa, synthetic construct
KRWVCR

SEQ ID NO: 1635 - protein, 6 aa, synthetic construct
RKWRCK

SEQ ID NO: 1636 - protein, 6 aa, synthetic construct
KKLFYK

SEQ ID NO: 1637 - protein, 6 aa, synthetic construct
RKWFLK

SEQ ID NO: 1638 - protein, 6 aa, synthetic construct
RRGFQK

SEQ ID NO: 1639 - protein, 6 aa, synthetic construct
KRRQTK

SEQ ID NO: 1640 - protein, 6 aa, synthetic construct
KRVYSK

SEQ ID NO: 1641 - protein, 6 aa, synthetic construct
RRVYYR

SEQ ID NO: 1642 - protein, 6 aa, synthetic construct
RKLQYK

SEQ ID NO: 1643 - protein, 6 aa, synthetic construct
RKVLLK

SEQ ID NO: 1644 - protein, 6 aa, synthetic construct
KKWILK

SEQ ID NO: 1645 - protein, 6 aa, synthetic construct
KRVRLR

SEQ ID NO: 1646 - protein, 6 aa, synthetic construct
RRVIRR

SEQ ID NO: 1647 - protein, 6 aa, synthetic construct
RRRQQK

SEQ ID NO: 1648 - protein, 6 aa, synthetic construct
RKRFSR

SEQ ID NO: 1649 - protein, 6 aa, synthetic construct
KRGRCK

SEQ ID NO: 1650 - protein, 6 aa, synthetic construct
RKVVYK

SEQ ID NO: 1651 - protein, 6 aa, synthetic construct
RKVRLR

SEQ ID NO: 1652 - protein, 6 aa, synthetic construct
KRLYTR

SEQ ID NO: 1653 - protein, 6 aa, synthetic construct
KKWQQK

SEQ ID NO: 1654 - protein, 6 aa, synthetic construct
RKVLRR

SEQ ID NO: 1655 - protein, 6 aa, synthetic construct
RRVFYK

SEQ ID NO: 1656 - protein, 6 aa, synthetic construct
RRGQYR

SEQ ID NO: 1657 - protein, 6 aa, synthetic construct
RKLLCR

SEQ ID NO: 1658 - protein, 6 aa, synthetic construct
RKGQLK

SEQ ID NO: 1659 - protein, 6 aa, synthetic construct
RRWVYK

SEQ ID NO: 1660 - protein, 6 aa, synthetic construct
RRGFYR

SEQ ID NO: 1661 - protein, 6 aa, synthetic construct
RRGYTR

SEQ ID NO: 1662 - protein, 6 aa, synthetic construct
RKQILK

SEQ ID NO: 1663 - protein, 6 aa, synthetic construct
KRSFRK

SEQ ID NO: 1664 - protein, 6 aa, synthetic construct
RRQRLK

SEQ ID NO: 1665 - protein, 6 aa, synthetic construct
RKQVYK

SEQ ID NO: 1666 - protein, 6 aa, synthetic construct
KRSICR

SEQ ID NO: 1667 - protein, 6 aa, synthetic construct
KRGYQK

SEQ ID NO: 1668 - protein, 6 aa, synthetic construct
RRLYRR

SEQ ID NO: 1669 - protein, 6 aa, synthetic construct
KKLIYR

SEQ ID NO: 1670 - protein, 6 aa, synthetic construct
KKWVYR

SEQ ID NO: 1671 - protein, 6 aa, synthetic construct
KKWRCK

SEQ ID NO: 1672 - protein, 6 aa, synthetic construct
KRQRCK

SEQ ID NO: 1673 - protein, 6 aa, synthetic construct
KKVLSK

SEQ ID NO: 1674 - protein, 6 aa, synthetic construct
KRLFSK

SEQ ID NO: 1675 - protein, 6 aa, synthetic construct
RKLQTK

SEQ ID NO: 1676 - protein, 6 aa, synthetic construct
KRRRQK

SEQ ID NO: 1677 - protein, 6 aa, synthetic construct
KRQQTK

SEQ ID NO: 1678 - protein, 6 aa, synthetic construct
RKVRYK

SEQ ID NO: 1679 - protein, 6 aa, synthetic construct
RRSLTR

SEQ ID NO: 1680 - protein, 6 aa, synthetic construct
KKQFYK

SEQ ID NO: 1681 - protein, 6 aa, synthetic construct
KRWRCK

SEQ ID NO: 1682 - protein, 6 aa, synthetic construct
RKQVRK

SEQ ID NO: 1683 - protein, 6 aa, synthetic construct
KRQVTK

SEQ ID NO: 1684 - protein, 6 aa, synthetic construct
KKLYLR

SEQ ID NO: 1685 - protein, 6 aa, synthetic construct
RRWYRR

SEQ ID NO: 1686 - protein, 6 aa, synthetic construct
KRQVRK

SEQ ID NO: 1687 - protein, 6 aa, synthetic construct
RKGRRK

SEQ ID NO: 1688 - protein, 6 aa, synthetic construct
KKWYSK

SEQ ID NO: 1689 - protein, 6 aa, synthetic construct
KKVITK

SEQ ID NO: 1690 - protein, 6 aa, synthetic construct
KKLFRR

SEQ ID NO: 1691 - protein, 6 aa, synthetic construct
RKLRLR

SEQ ID NO: 1692 - protein, 6 aa, synthetic construct
RRWRQK

SEQ ID NO: 1693 - protein, 6 aa, synthetic construct
KRGYLR

SEQ ID NO: 1694 - protein, 6 aa, synthetic construct
KKLFSR

SEQ ID NO: 1695 - protein, 6 aa, synthetic construct
RKGFQR

SEQ ID NO: 1696 - protein, 6 aa, synthetic construct
RRVYQR

SEQ ID NO: 1697 - protein, 6 aa, synthetic construct
KRRQLR

SEQ ID NO: 1698 - protein, 6 aa, synthetic construct
RKRQQK

SEQ ID NO: 1699 - protein, 6 aa, synthetic construct
RKLFYR

SEQ ID NO: 1700 - protein, 6 aa, synthetic construct
RKLQSK

SEQ ID NO: 1701 - protein, 6 aa, synthetic construct
KRVLYK

SEQ ID NO: 1702 - protein, 6 aa, synthetic construct
RKLFSR

SEQ ID NO: 1703 - protein, 6 aa, synthetic construct
KRRLCK

SEQ ID NO: 1704 - protein, 6 aa, synthetic construct
RRSITR

SEQ ID NO: 1705 - protein, 6 aa, synthetic construct
RRRFTR

SEQ ID NO: 1706 - protein, 6 aa, synthetic construct
RRRLSK

SEQ ID NO: 1707 - protein, 6 aa, synthetic construct
RRSQSK

SEQ ID NO: 1708 - protein, 6 aa, synthetic construct
RRQFSK

SEQ ID NO: 1709 - protein, 6 aa, synthetic construct
RKWLRK

SEQ ID NO: 1710 - protein, 6 aa, synthetic construct
KRRQSR

SEQ ID NO: 1711 - protein, 6 aa, synthetic construct
RKVYRR

SEQ ID NO: 1712 - protein, 6 aa, synthetic construct
RKWICK

SEQ ID NO: 1713 - protein, 6 aa, synthetic construct
RKQIRR

SEQ ID NO: 1714 - protein, 6 aa, synthetic construct
KKGRSK

SEQ ID NO: 1715 - protein, 6 aa, synthetic construct
RRGLSR

SEQ ID NO: 1716 - protein, 6 aa, synthetic construct
KKRFSR

SEQ ID NO: 1717 - protein, 6 aa, synthetic construct
KKGLCK

SEQ ID NO: 1718 - protein, 6 aa, synthetic construct
KRWVLK

SEQ ID NO: 1719 - protein, 6 aa, synthetic construct
KRRQCK

SEQ ID NO: 1720 - protein, 6 aa, synthetic construct
KRQIYK

SEQ ID NO: 1721 - protein, 6 aa, synthetic construct
RKVISR

SEQ ID NO: 1722 - protein, 6 aa, synthetic construct
RKRRLR

SEQ ID NO: 1723 - protein, 6 aa, synthetic construct
KRRRSK

SEQ ID NO: 1724 - protein, 6 aa, synthetic construct
KKGRQK

SEQ ID NO: 1725 - protein, 6 aa, synthetic construct
RRQLRR

SEQ ID NO: 1726 - protein, 6 aa, synthetic construct
KRGYTR

SEQ ID NO: 1727 - protein, 6 aa, synthetic construct
KKGIYR

SEQ ID NO: 1728 - protein, 6 aa, synthetic construct
KRSYTR

SEQ ID NO: 1729 - protein, 6 aa, synthetic construct
RRSLCK

SEQ ID NO: 1730 - protein, 6 aa, synthetic construct
KRLVSK

SEQ ID NO: 1731 - protein, 6 aa, synthetic construct
RKGQTK

SEQ ID NO: 1732 - protein, 6 aa, synthetic construct
KKSQLR

SEQ ID NO: 1733 - protein, 6 aa, synthetic construct
RKWFSR

SEQ ID NO: 1734 - protein, 6 aa, synthetic construct
KKRLCR

SEQ ID NO: 1735 - protein, 6 aa, synthetic construct
RRVILK

SEQ ID NO: 1736 - protein, 6 aa, synthetic construct
RRWFRK

SEQ ID NO: 1737 - protein, 6 aa, synthetic construct
RRGLCK

SEQ ID NO: 1738 - protein, 6 aa, synthetic construct
RRSQCK

SEQ ID NO: 1739 - protein, 6 aa, synthetic construct
KRGIRK

SEQ ID NO: 1740 - protein, 6 aa, synthetic construct
KRVQTR

SEQ ID NO: 1741 - protein, 6 aa, synthetic construct
RKWFTR

SEQ ID NO: 1742 - protein, 6 aa, synthetic construct
KRWFRR

SEQ ID NO: 1743 - protein, 6 aa, synthetic construct
RRSVCK

SEQ ID NO: 1744 - protein, 6 aa, synthetic construct
KRVICR

SEQ ID NO: 1745 - protein, 6 aa, synthetic construct
RRSYRK

SEQ ID NO: 1746 - protein, 6 aa, synthetic construct
RKLVQR

SEQ ID NO: 1747 - protein, 6 aa, synthetic construct
RKVQQR

SEQ ID NO: 1748 - protein, 6 aa, synthetic construct
RRVYSR

SEQ ID NO: 1749 - protein, 6 aa, synthetic construct
KKSYQR

SEQ ID NO: 1750 - protein, 6 aa, synthetic construct
RRLICR

SEQ ID NO: 1751 - protein, 6 aa, synthetic construct
KRGRLR

SEQ ID NO: 1752 - protein, 6 aa, synthetic construct
RKRYRK

SEQ ID NO: 1753 - protein, 6 aa, synthetic construct
RRGVRK

SEQ ID NO: 1754 - protein, 6 aa, synthetic construct
KRSVTR

SEQ ID NO: 1755 - protein, 6 aa, synthetic construct
KKWYLK

SEQ ID NO: 1756 - protein, 6 aa, synthetic construct
KKGFTK

SEQ ID NO: 1757 - protein, 6 aa, synthetic construct
KRQVQK

SEQ ID NO: 1758 - protein, 6 aa, synthetic construct
RRLIQR

SEQ ID NO: 1759 - protein, 6 aa, synthetic construct
RRRLTK

SEQ ID NO: 1760 - protein, 6 aa, synthetic construct
RRSFSK

SEQ ID NO: 1761 - protein, 6 aa, synthetic construct
RKVYLK

SEQ ID NO: 1762 - protein, 6 aa, synthetic construct
KRSYQR

SEQ ID NO: 1763 - protein, 6 aa, synthetic construct
RRSFTR

SEQ ID NO: 1764 - protein, 6 aa, synthetic construct
KRSITK

SEQ ID NO: 1765 - protein, 6 aa, synthetic construct
KRSIRR

SEQ ID NO: 1766 - protein, 6 aa, synthetic construct
KKSFCR

SEQ ID NO: 1767 - protein, 6 aa, synthetic construct
KKRVSR

SEQ ID NO: 1768 - protein, 6 aa, synthetic construct
KRWQQK

SEQ ID NO: 1769 - protein, 6 aa, synthetic construct
RRVITK

SEQ ID NO: 1770 - protein, 6 aa, synthetic construct
RKRLRK

SEQ ID NO: 1771 - protein, 6 aa, synthetic construct
RKLLCK

SEQ ID NO: 1772 - protein, 6 aa, synthetic construct
KRVLLK

SEQ ID NO: 1773 - protein, 6 aa, synthetic construct
KRVLLR

SEQ ID NO: 1774 - protein, 6 aa, synthetic construct
RKSYLR

SEQ ID NO: 1775 - protein, 6 aa, synthetic construct
KRWVRR

SEQ ID NO: 1776 - protein, 6 aa, synthetic construct
RKRQRR

SEQ ID NO: 1777 - protein, 6 aa, synthetic construct
KKQYQR

SEQ ID NO: 1778 - protein, 6 aa, synthetic construct
RKGQYK

SEQ ID NO: 1779 - protein, 6 aa, synthetic construct
KRSVRK

SEQ ID NO: 1780 - protein, 6 aa, synthetic construct
KKSLQK

SEQ ID NO: 1781 - protein, 6 aa, synthetic construct
KRGLYK

SEQ ID NO: 1782 - protein, 6 aa, synthetic construct
KRWFLK

SEQ ID NO: 1783 - protein, 6 aa, synthetic construct
KKVLYK

SEQ ID NO: 1784 - protein, 6 aa, synthetic construct
RKQVSK

SEQ ID NO: 1785 - protein, 6 aa, synthetic construct
RKSRQK

SEQ ID NO: 1786 - protein, 6 aa, synthetic construct
KRVICK

SEQ ID NO: 1787 - protein, 6 aa, synthetic construct
KKQLLK

SEQ ID NO: 1788 - protein, 6 aa, synthetic construct
RRLVRK

SEQ ID NO: 1789 - protein, 6 aa, synthetic construct
KKLQQK

SEQ ID NO: 1790 - protein, 6 aa, synthetic construct
RKGVTK

SEQ ID NO: 1791 - protein, 6 aa, synthetic construct
KKRLYR

SEQ ID NO: 1792 - protein, 6 aa, synthetic construct
RRWLSK

SEQ ID NO: 1793 - protein, 6 aa, synthetic construct
RKVYRK

SEQ ID NO: 1794 - protein, 6 aa, synthetic construct
KRQLQR

SEQ ID NO: 1795 - protein, 6 aa, synthetic construct
KKSLCK

SEQ ID NO: 1796 - protein, 6 aa, synthetic construct
RKGVLR

SEQ ID NO: 1797 - protein, 6 aa, synthetic construct
KRGFYK

SEQ ID NO: 1798 - protein, 6 aa, synthetic construct
RKWLSK

SEQ ID NO: 1799 - protein, 6 aa, synthetic construct
KKLYQR

SEQ ID NO: 1800 - protein, 6 aa, synthetic construct
KRGYCR

SEQ ID NO: 1801 - protein, 6 aa, synthetic construct
KKEWNK

SEQ ID NO: 1802 - protein, 6 aa, synthetic construct
RKAEKR

SEQ ID NO: 1803 - protein, 6 aa, synthetic construct
KRPHFK

SEQ ID NO: 1804 - protein, 6 aa, synthetic construct
KKFTKK

SEQ ID NO: 1805 - protein, 6 aa, synthetic construct
RKNADR

SEQ ID NO: 1806 - protein, 6 aa, synthetic construct
RREWFR

SEQ ID NO: 1807 - protein, 6 aa, synthetic construct
KKDHFR

SEQ ID NO: 1808 - protein, 6 aa, synthetic construct
KKACMR

SEQ ID NO: 1809 - protein, 6 aa, synthetic construct
RKNPVR

SEQ ID NO: 1810 - protein, 6 aa, synthetic construct
KKHHER

SEQ ID NO: 1811 - protein, 6 aa, synthetic construct
KKNCHK

SEQ ID NO: 1812 - protein, 6 aa, synthetic construct
KRIMER

SEQ ID NO: 1813 - protein, 6 aa, synthetic construct
KRIMKK

SEQ ID NO: 1814 - protein, 6 aa, synthetic construct
KKEEER

SEQ ID NO: 1815 - protein, 6 aa, synthetic construct
KKTSER

SEQ ID NO: 1816 - protein, 6 aa, synthetic construct
KKNTIK

SEQ ID NO: 1817 - protein, 6 aa, synthetic construct
KRHNVR

SEQ ID NO: 1818 - protein, 6 aa, synthetic construct
RKCHVK

SEQ ID NO: 1819 - protein, 6 aa, synthetic construct
KKIDKR

SEQ ID NO: 1820 - protein, 6 aa, synthetic construct
RRKTAK

SEQ ID NO: 1821 - protein, 6 aa, synthetic construct
RRMAGK

SEQ ID NO: 1822 - protein, 6 aa, synthetic construct
KKCPNR

SEQ ID NO: 1823 - protein, 6 aa, synthetic construct
RRTDWR

SEQ ID NO: 1824 - protein, 6 aa, synthetic construct
KKPPAK

SEQ ID NO: 1825 - protein, 6 aa, synthetic construct
KREDKK

SEQ ID NO: 1826 - protein, 6 aa, synthetic construct
KRPDNR

SEQ ID NO: 1827 - protein, 6 aa, synthetic construct
RRTWWR

SEQ ID NO: 1828 - protein, 6 aa, synthetic construct
RRENEK

SEQ ID NO: 1829 - protein, 6 aa, synthetic construct
RKMDAK

SEQ ID NO: 1830 - protein, 6 aa, synthetic construct
KRMEPR

SEQ ID NO: 1831 - protein, 6 aa, synthetic construct
RRYSDR

SEQ ID NO: 1832 - protein, 6 aa, synthetic construct
RKDTAR

SEQ ID NO: 1833 - protein, 6 aa, synthetic construct
RKIDAK

SEQ ID NO: 1834 - protein, 6 aa, synthetic construct
KKNTMR

SEQ ID NO: 1835 - protein, 6 aa, synthetic construct
KKTTWK

SEQ ID NO: 1836 - protein, 6 aa, synthetic construct
RKYKDR

SEQ ID NO: 1837 - protein, 6 aa, synthetic construct
RRFEFK

SEQ ID NO: 1838 - protein, 6 aa, synthetic construct
KKESHR

SEQ ID NO: 1839 - protein, 6 aa, synthetic construct
KRPNVR

SEQ ID NO: 1840 - protein, 6 aa, synthetic construct
RRNCWR

SEQ ID NO: 1841 - protein, 6 aa, synthetic construct
RREMFK

SEQ ID NO: 1842 - protein, 6 aa, synthetic construct
KKYNGK

SEQ ID NO: 1843 - protein, 6 aa, synthetic construct
KRYSMR

SEQ ID NO: 1844 - protein, 6 aa, synthetic construct
RKTWFR

SEQ ID NO: 1845 - protein, 6 aa, synthetic construct
RRTTIR

SEQ ID NO: 1846 - protein, 6 aa, synthetic construct
RRCTGK

SEQ ID NO: 1847 - protein, 6 aa, synthetic construct
RKYNVR

SEQ ID NO: 1848 - protein, 6 aa, synthetic construct
KKFWEK

SEQ ID NO: 1849 - protein, 6 aa, synthetic construct
RRIAGK

SEQ ID NO: 1850 - protein, 6 aa, synthetic construct
RRCNNR

SEQ ID NO: 1851 - protein, 6 aa, synthetic construct
KRICWK

SEQ ID NO: 1852 - protein, 6 aa, synthetic construct
RRPEVK

SEQ ID NO: 1853 - protein, 6 aa, synthetic construct
KRMTHR

SEQ ID NO: 1854 - protein, 6 aa, synthetic construct
KRMNDR

SEQ ID NO: 1855 - protein, 6 aa, synthetic construct
RKNMFR

SEQ ID NO: 1856 - protein, 6 aa, synthetic construct
RRPTHK

SEQ ID NO: 1857 - protein, 6 aa, synthetic construct
RRCTVR

SEQ ID NO: 1858 - protein, 6 aa, synthetic construct
RKKEMK

SEQ ID NO: 1859 - protein, 6 aa, synthetic construct
KKPSKR

SEQ ID NO: 1860 - protein, 6 aa, synthetic construct
KKYHVK

SEQ ID NO: 1861 - protein, 6 aa, synthetic construct
RKPKWR

SEQ ID NO: 1862 - protein, 6 aa, synthetic construct
KKMTER

SEQ ID NO: 1863 - protein, 6 aa, synthetic construct
KKFKDR

SEQ ID NO: 1864 - protein, 6 aa, synthetic construct
KRDHIK

SEQ ID NO: 1865 - protein, 6 aa, synthetic construct
KKCDGK

SEQ ID NO: 1866 - protein, 6 aa, synthetic construct
KKAANK

SEQ ID NO: 1867 - protein, 6 aa, synthetic construct
KRDSPK

SEQ ID NO: 1868 - protein, 6 aa, synthetic construct
RKATVK

SEQ ID NO: 1869 - protein, 6 aa, synthetic construct
KRNMAK

SEQ ID NO: 1870 - protein, 6 aa, synthetic construct
KKDWNR

SEQ ID NO: 1871 - protein, 6 aa, synthetic construct
KKNMVR

SEQ ID NO: 1872 - protein, 6 aa, synthetic construct
RKMEIR

SEQ ID NO: 1873 - protein, 6 aa, synthetic construct
RRAMPK

SEQ ID NO: 1874 - protein, 6 aa, synthetic construct
RKHPKK

SEQ ID NO: 1875 - protein, 6 aa, synthetic construct
KKIWKR

SEQ ID NO: 1876 - protein, 6 aa, synthetic construct
KRCPWR

SEQ ID NO: 1877 - protein, 6 aa, synthetic construct
KKCCFR

SEQ ID NO: 1878 - protein, 6 aa, synthetic construct
KRMAAK

SEQ ID NO: 1879 - protein, 6 aa, synthetic construct
KKAEER

SEQ ID NO: 1880 - protein, 6 aa, synthetic construct
KKDPPR

SEQ ID NO: 1881 - protein, 6 aa, synthetic construct
KKEWKK

SEQ ID NO: 1882 - protein, 6 aa, synthetic construct
KKKDIR

SEQ ID NO: 1883 - protein, 6 aa, synthetic construct
KRDSMR

SEQ ID NO: 1884 - protein, 6 aa, synthetic construct
KRNNDR

SEQ ID NO: 1885 - protein, 6 aa, synthetic construct
RRESWK

SEQ ID NO: 1886 - protein, 6 aa, synthetic construct
KKYEVR

SEQ ID NO: 1887 - protein, 6 aa, synthetic construct
RREWIK

SEQ ID NO: 1888 - protein, 6 aa, synthetic construct
RKDEVR

SEQ ID NO: 1889 - protein, 6 aa, synthetic construct
KRCPVR

SEQ ID NO: 1890 - protein, 6 aa, synthetic construct
KREAER

SEQ ID NO: 1891 - protein, 6 aa, synthetic construct
RKPKAR

SEQ ID NO: 1892 - protein, 6 aa, synthetic construct
RKNTHK

SEQ ID NO: 1893 - protein, 6 aa, synthetic construct
RKIDMK

SEQ ID NO: 1894 - protein, 6 aa, synthetic construct
RKYTKR

SEQ ID NO: 1895 - protein, 6 aa, synthetic construct
KRADVK

SEQ ID NO: 1896 - protein, 6 aa, synthetic construct
KKHCNR

SEQ ID NO: 1897 - protein, 6 aa, synthetic construct
RRPTNR

SEQ ID NO: 1898 - protein, 6 aa, synthetic construct
KRFNHK

SEQ ID NO: 1899 - protein, 6 aa, synthetic construct
RRTTVR

SEQ ID NO: 1900 - protein, 6 aa, synthetic construct
RKKMWK

SEQ ID NO: 1901 - protein, 6 aa, synthetic construct
RRKTWR

SEQ ID NO: 1902 - protein, 6 aa, synthetic construct
KRDWVK

SEQ ID NO: 1903 - protein, 6 aa, synthetic construct
KKFHPR

SEQ ID NO: 1904 - protein, 6 aa, synthetic construct
RRMCER

SEQ ID NO: 1905 - protein, 6 aa, synthetic construct
KRTEWR

SEQ ID NO: 1906 - protein, 6 aa, synthetic construct
KRMKDR

SEQ ID NO: 1907 - protein, 6 aa, synthetic construct
KRFWPK

SEQ ID NO: 1908 - protein, 6 aa, synthetic construct
KKKHEK

SEQ ID NO: 1909 - protein, 6 aa, synthetic construct
KKFKPK

SEQ ID NO: 1910 - protein, 6 aa, synthetic construct
KKMHHR

SEQ ID NO: 1911 - protein, 6 aa, synthetic construct
RRATHR

SEQ ID NO: 1912 - protein, 6 aa, synthetic construct
KKPSNK

SEQ ID NO: 1913 - protein, 6 aa, synthetic construct
KKATNK

SEQ ID NO: 1914 - protein, 6 aa, synthetic construct
KRTSFK

SEQ ID NO: 1915 - protein, 6 aa, synthetic construct
KRMMVK

SEQ ID NO: 1916 - protein, 6 aa, synthetic construct
RRMPFK

SEQ ID NO: 1917 - protein, 6 aa, synthetic construct
KRHEDR

SEQ ID NO: 1918 - protein, 6 aa, synthetic construct
RKFKAR

SEQ ID NO: 1919 - protein, 6 aa, synthetic construct
KKDAEK

SEQ ID NO: 1920 - protein, 6 aa, synthetic construct
RRKHKR

SEQ ID NO: 1921 - protein, 6 aa, synthetic construct
RKAMEK

SEQ ID NO: 1922 - protein, 6 aa, synthetic construct
RRNKVR

SEQ ID NO: 1923 - protein, 6 aa, synthetic construct
RKMPAK

SEQ ID NO: 1924 - protein, 6 aa, synthetic construct
KRPKNK

SEQ ID NO: 1925 - protein, 6 aa, synthetic construct
KKDKPK

SEQ ID NO: 1926 - protein, 6 aa, synthetic construct
KKHSMK

SEQ ID NO: 1927 - protein, 6 aa, synthetic construct
RKANGK

SEQ ID NO: 1928 - protein, 6 aa, synthetic construct
RRDNAR

SEQ ID NO: 1929 - protein, 6 aa, synthetic construct
KKKSGK

SEQ ID NO: 1930 - protein, 6 aa, synthetic construct
KRATFR

SEQ ID NO: 1931 - protein, 6 aa, synthetic construct
RRIKAR

SEQ ID NO: 1932 - protein, 6 aa, synthetic construct
RRAAVR

SEQ ID NO: 1933 - protein, 6 aa, synthetic construct
KKKMFK

SEQ ID NO: 1934 - protein, 6 aa, synthetic construct
RRTHER

SEQ ID NO: 1935 - protein, 6 aa, synthetic construct
RKDKER

SEQ ID NO: 1936 - protein, 6 aa, synthetic construct
KKATDK

SEQ ID NO: 1937 - protein, 6 aa, synthetic construct
RRKNAR

SEQ ID NO: 1938 - protein, 6 aa, synthetic construct
RKYHHR

SEQ ID NO: 1939 - protein, 6 aa, synthetic construct
RKCCEK

SEQ ID NO: 1940 - protein, 6 aa, synthetic construct
RKDNKR

SEQ ID NO: 1941 - protein, 6 aa, synthetic construct
RKEAGR

SEQ ID NO: 1942 - protein, 6 aa, synthetic construct
RRFHWR

SEQ ID NO: 1943 - protein, 6 aa, synthetic construct
KKTMVR

SEQ ID NO: 1944 - protein, 6 aa, synthetic construct
RKHEIK

SEQ ID NO: 1945 - protein, 6 aa, synthetic construct
KKTMEK

SEQ ID NO: 1946 - protein, 6 aa, synthetic construct
RKMSVK

SEQ ID NO: 1947 - protein, 6 aa, synthetic construct
KKTMDR

SEQ ID NO: 1948 - protein, 6 aa, synthetic construct
RKHNGR

SEQ ID NO: 1949 - protein, 6 aa, synthetic construct
RKPHWR

SEQ ID NO: 1950 - protein, 6 aa, synthetic construct
KRENIK

SEQ ID NO: 1951 - protein, 6 aa, synthetic construct
RRTNFK

SEQ ID NO: 1952 - protein, 6 aa, synthetic construct
KRPTEK

SEQ ID NO: 1953 - protein, 6 aa, synthetic construct
KKDTHK

SEQ ID NO: 1954 - protein, 6 aa, synthetic construct
RKKKMK

SEQ ID NO: 1955 - protein, 6 aa, synthetic construct
RRANMR

SEQ ID NO: 1956 - protein, 6 aa, synthetic construct
RKAKMK

SEQ ID NO: 1957 - protein, 6 aa, synthetic construct
RKDNEK

SEQ ID NO: 1958 - protein, 6 aa, synthetic construct
KKYHHR

SEQ ID NO: 1959 - protein, 6 aa, synthetic construct
RKMTWR

SEQ ID NO: 1960 - protein, 6 aa, synthetic construct
KRMMVR

SEQ ID NO: 1961 - protein, 6 aa, synthetic construct
RKETFR

SEQ ID NO: 1962 - protein, 6 aa, synthetic construct
KKTKAR

SEQ ID NO: 1963 - protein, 6 aa, synthetic construct
RRDCAK

SEQ ID NO: 1964 - protein, 6 aa, synthetic construct
RRNPFK

SEQ ID NO: 1965 - protein, 6 aa, synthetic construct
KRASPK

SEQ ID NO: 1966 - protein, 6 aa, synthetic construct
RKCTIR

SEQ ID NO: 1967 - protein, 6 aa, synthetic construct
KRTPDK

SEQ ID NO: 1968 - protein, 6 aa, synthetic construct
RKFEWK

SEQ ID NO: 1969 - protein, 6 aa, synthetic construct
RKMPVK

SEQ ID NO: 1970 - protein, 6 aa, synthetic construct
RKTNAR

SEQ ID NO: 1971 - protein, 6 aa, synthetic construct
KKMDIK

SEQ ID NO: 1972 - protein, 6 aa, synthetic construct
KRNCAK

SEQ ID NO: 1973 - protein, 6 aa, synthetic construct
KRTEIR

SEQ ID NO: 1974 - protein, 6 aa, synthetic construct
KKEMER

SEQ ID NO: 1975 - protein, 6 aa, synthetic construct
KKYPWR

SEQ ID NO: 1976 - protein, 6 aa, synthetic construct
KKTSIK

SEQ ID NO: 1977 - protein, 6 aa, synthetic construct
RRHNHR

SEQ ID NO: 1978 - protein, 6 aa, synthetic construct
RRDDFR

SEQ ID NO: 1979 - protein, 6 aa, synthetic construct
RRPDAR

SEQ ID NO: 1980 - protein, 6 aa, synthetic construct
KRKCWR

SEQ ID NO: 1981 - protein, 6 aa, synthetic construct
RRHWDK

SEQ ID NO: 1982 - protein, 6 aa, synthetic construct
KKNAWK

SEQ ID NO: 1983 - protein, 6 aa, synthetic construct
KKNEFK

SEQ ID NO: 1984 - protein, 6 aa, synthetic construct
KKFTPK

SEQ ID NO: 1985 - protein, 6 aa, synthetic construct
KKTCER

SEQ ID NO: 1986 - protein, 6 aa, synthetic construct
KRIKEK

SEQ ID NO: 1987 - protein, 6 aa, synthetic construct
KKESIK

SEQ ID NO: 1988 - protein, 6 aa, synthetic construct
RKIPKK

SEQ ID NO: 1989 - protein, 6 aa, synthetic construct
KRMMPK

SEQ ID NO: 1990 - protein, 6 aa, synthetic construct
KKPNPK

SEQ ID NO: 1991 - protein, 6 aa, synthetic construct
RKPDDK

SEQ ID NO: 1992 - protein, 6 aa, synthetic construct
KRKDKK

SEQ ID NO: 1993 - protein, 6 aa, synthetic construct
KKTPNR

SEQ ID NO: 1994 - protein, 6 aa, synthetic construct
RKYEPK

SEQ ID NO: 1995 - protein, 6 aa, synthetic construct
KKCHMR

SEQ ID NO: 1996 - protein, 6 aa, synthetic construct
RRHAFK

SEQ ID NO: 1997 - protein, 6 aa, synthetic construct
RRAWNK

SEQ ID NO: 1998 - protein, 6 aa, synthetic construct
RRDCFR

SEQ ID NO: 1999 - protein, 6 aa, synthetic construct
RRKKKR

SEQ ID NO: 2000 - protein, 6 aa, synthetic construct
RREHIR

SEQ ID NO: 2001 - protein, 6 aa, synthetic construct
KKCAVK

SEQ ID NO: 2002 - protein, 6 aa, synthetic construct
RKYHGR

SEQ ID NO: 2003 - protein, 6 aa, synthetic construct
RKMKHK

SEQ ID NO: 2004 - protein, 6 aa, synthetic construct
KRDPFR

SEQ ID NO: 2005 - protein, 6 aa, synthetic construct
KRDTMK

SEQ ID NO: 2006 - protein, 6 aa, synthetic construct
RKKTIR

SEQ ID NO: 2007 - protein, 6 aa, synthetic construct
RRDKNR

SEQ ID NO: 2008 - protein, 6 aa, synthetic construct
RRFEKK

SEQ ID NO: 2009 - protein, 6 aa, synthetic construct
KKKSNR

SEQ ID NO: 2010 - protein, 6 aa, synthetic construct
RKCNAR

SEQ ID NO: 2011 - protein, 6 aa, synthetic construct
KRHCHK

SEQ ID NO: 2012 - protein, 6 aa, synthetic construct
RKDHMK

SEQ ID NO: 2013 - protein, 6 aa, synthetic construct
RREDFK

SEQ ID NO: 2014 - protein, 6 aa, synthetic construct
KKCNAK

SEQ ID NO: 2015 - protein, 6 aa, synthetic construct
RRFEMR

SEQ ID NO: 2016 - protein, 6 aa, synthetic construct
RKIDFK

SEQ ID NO: 2017 - protein, 6 aa, synthetic construct
RRIMKR

SEQ ID NO: 2018 - protein, 6 aa, synthetic construct
RKIKAR

SEQ ID NO: 2019 - protein, 6 aa, synthetic construct
KRMHAK

SEQ ID NO: 2020 - protein, 6 aa, synthetic construct
KRNDGK

SEQ ID NO: 2021 - protein, 6 aa, synthetic construct
RRTTNR

SEQ ID NO: 2022 - protein, 6 aa, synthetic construct
KREPIK

SEQ ID NO: 2023 - protein, 6 aa, synthetic construct
KRHTGK

SEQ ID NO: 2024 - protein, 6 aa, synthetic construct
KKMNIK

SEQ ID NO: 2025 - protein, 6 aa, synthetic construct
RKEKWK

SEQ ID NO: 2026 - protein, 6 aa, synthetic construct
KKAHMR

SEQ ID NO: 2027 - protein, 6 aa, synthetic construct
RKKKFR

SEQ ID NO: 2028 - protein, 6 aa, synthetic construct
RRPNMK

SEQ ID NO: 2029 - protein, 6 aa, synthetic construct
RRIHKK

SEQ ID NO: 2030 - protein, 6 aa, synthetic construct
KKTTMK

SEQ ID NO: 2031 - protein, 6 aa, synthetic construct
KKNPWK

SEQ ID NO: 2032 - protein, 6 aa, synthetic construct
RKYWGK

SEQ ID NO: 2033 - protein, 6 aa, synthetic construct
RRYKNR

SEQ ID NO: 2034 - protein, 6 aa, synthetic construct
KRNTIR

SEQ ID NO: 2035 - protein, 6 aa, synthetic construct
KRTADK

SEQ ID NO: 2036 - protein, 6 aa, synthetic construct
RRCMIK

SEQ ID NO: 2037 - protein, 6 aa, synthetic construct
KRDHAK

SEQ ID NO: 2038 - protein, 6 aa, synthetic construct
KRNTWK

SEQ ID NO: 2039 - protein, 6 aa, synthetic construct
KRNWAK

SEQ ID NO: 2040 - protein, 6 aa, synthetic construct
RKICNK

SEQ ID NO: 2041 - protein, 6 aa, synthetic construct
KKDAPR

SEQ ID NO: 2042 - protein, 6 aa, synthetic construct
RRFANK

SEQ ID NO: 2043 - protein, 6 aa, synthetic construct
KKKTIK

SEQ ID NO: 2044 - protein, 6 aa, synthetic construct
KKPMNR

SEQ ID NO: 2045 - protein, 6 aa, synthetic construct
KKIDKK

SEQ ID NO: 2046 - protein, 6 aa, synthetic construct
RKDAEK

SEQ ID NO: 2047 - protein, 6 aa, synthetic construct
KKYNHK

SEQ ID NO: 2048 - protein, 6 aa, synthetic construct
RKTMFK

SEQ ID NO: 2049 - protein, 6 aa, synthetic construct
KKFNWK

SEQ ID NO: 2050 - protein, 6 aa, synthetic construct
RRNPEK

SEQ ID NO: 2051 - protein, 6 aa, synthetic construct
RRYMEK

SEQ ID NO: 2052 - protein, 6 aa, synthetic construct
KRASVK

SEQ ID NO: 2053 - protein, 6 aa, synthetic construct
KRCNGR

SEQ ID NO: 2054 - protein, 6 aa, synthetic construct
KKEAVR

SEQ ID NO: 2055 - protein, 6 aa, synthetic construct
RKCDVR

SEQ ID NO: 2056 - protein, 6 aa, synthetic construct
KRMWFK

SEQ ID NO: 2057 - protein, 6 aa, synthetic construct
KRPAFK

SEQ ID NO: 2058 - protein, 6 aa, synthetic construct
KKKHKR

SEQ ID NO: 2059 - protein, 6 aa, synthetic construct
RKCMVK

SEQ ID NO: 2060 - protein, 6 aa, synthetic construct
RKHWWR

SEQ ID NO: 2061 - protein, 6 aa, synthetic construct
KRINIR

SEQ ID NO: 2062 - protein, 6 aa, synthetic construct
KKHSEK

SEQ ID NO: 2063 - protein, 6 aa, synthetic construct
RRCTER

SEQ ID NO: 2064 - protein, 6 aa, synthetic construct
RRTWGR

SEQ ID NO: 2065 - protein, 6 aa, synthetic construct
KKMTAR

SEQ ID NO: 2066 - protein, 6 aa, synthetic construct
KRCHFR

SEQ ID NO: 2067 - protein, 6 aa, synthetic construct
KRIPMR

SEQ ID NO: 2068 - protein, 6 aa, synthetic construct
KKHHAR

SEQ ID NO: 2069 - protein, 6 aa, synthetic construct
KRKDER

SEQ ID NO: 2070 - protein, 6 aa, synthetic construct
KRMSHR

SEQ ID NO: 2071 - protein, 6 aa, synthetic construct
KREWDR

SEQ ID NO: 2072 - protein, 6 aa, synthetic construct
KRPCHR

SEQ ID NO: 2073 - protein, 6 aa, synthetic construct
KRIWAR

SEQ ID NO: 2074 - protein, 6 aa, synthetic construct
KRANHK

SEQ ID NO: 2075 - protein, 6 aa, synthetic construct
KKTNGR

SEQ ID NO: 2076 - protein, 6 aa, synthetic construct
RKYWAR

SEQ ID NO: 2077 - protein, 6 aa, synthetic construct
KKPEWR

SEQ ID NO: 2078 - protein, 6 aa, synthetic construct
RRKDNR

SEQ ID NO: 2079 - protein, 6 aa, synthetic construct
RRYNNR

SEQ ID NO: 2080 - protein, 6 aa, synthetic construct
KRPMDK

SEQ ID NO: 2081 - protein, 6 aa, synthetic construct
KKHMER

SEQ ID NO: 2082 - protein, 6 aa, synthetic construct
KKPAMR

SEQ ID NO: 2083 - protein, 6 aa, synthetic construct
KKIDDK

SEQ ID NO: 2084 - protein, 6 aa, synthetic construct
KRYTKR

SEQ ID NO: 2085 - protein, 6 aa, synthetic construct
RRKTPR

SEQ ID NO: 2086 - protein, 6 aa, synthetic construct
RKFSNK

SEQ ID NO: 2087 - protein, 6 aa, synthetic construct
KRINHR

SEQ ID NO: 2088 - protein, 6 aa, synthetic construct
KKTANK

SEQ ID NO: 2089 - protein, 6 aa, synthetic construct
KRIMEK

SEQ ID NO: 2090 - protein, 6 aa, synthetic construct
RRTSNK

SEQ ID NO: 2091 - protein, 6 aa, synthetic construct
RKMAFR

SEQ ID NO: 2092 - protein, 6 aa, synthetic construct
RKTEKR

SEQ ID NO: 2093 - protein, 6 aa, synthetic construct
RRIPHR

SEQ ID NO: 2094 - protein, 6 aa, synthetic construct
RKCWWR

SEQ ID NO: 2095 - protein, 6 aa, synthetic construct
KKDSKK

SEQ ID NO: 2096 - protein, 6 aa, synthetic construct
KRDWIK

SEQ ID NO: 2097 - protein, 6 aa, synthetic construct
RRPSIK

SEQ ID NO: 2098 - protein, 6 aa, synthetic construct
RKATKR

SEQ ID NO: 2099 - protein, 6 aa, synthetic construct
KRMKWK

SEQ ID NO: 2100 - protein, 6 aa, synthetic construct
RRDTGR

SEQ ID NO: 2101 - protein, 6 aa, synthetic construct
RKPNGR

SEQ ID NO: 2102 - protein, 6 aa, synthetic construct
RRDKMK

SEQ ID NO: 2103 - protein, 6 aa, synthetic construct
KKHKPR

SEQ ID NO: 2104 - protein, 6 aa, synthetic construct
KKDTKR

SEQ ID NO: 2105 - protein, 6 aa, synthetic construct
RRICER

SEQ ID NO: 2106 - protein, 6 aa, synthetic construct
KKINGK

SEQ ID NO: 2107 - protein, 6 aa, synthetic construct
RKPAWR

SEQ ID NO: 2108 - protein, 6 aa, synthetic construct
KKFMVR

SEQ ID NO: 2109 - protein, 6 aa, synthetic construct
RKFCMR

SEQ ID NO: 2110 - protein, 6 aa, synthetic construct
KRPTIR

SEQ ID NO: 2111 - protein, 6 aa, synthetic construct
KRCAAR

SEQ ID NO: 2112 - protein, 6 aa, synthetic construct
KKETFR

SEQ ID NO: 2113 - protein, 6 aa, synthetic construct
KRFWWK

SEQ ID NO: 2114 - protein, 6 aa, synthetic construct
RRKCVR

SEQ ID NO: 2115 - protein, 6 aa, synthetic construct
RKDTWK

SEQ ID NO: 2116 - protein, 6 aa, synthetic construct
RRNAAK

SEQ ID NO: 2117 - protein, 6 aa, synthetic construct
KRADDK

SEQ ID NO: 2118 - protein, 6 aa, synthetic construct
RRESMR

SEQ ID NO: 2119 - protein, 6 aa, synthetic construct
RKDHIK

SEQ ID NO: 2120 - protein, 6 aa, synthetic construct
RRPAMR

SEQ ID NO: 2121 - protein, 6 aa, synthetic construct
RKFWHR

SEQ ID NO: 2122 - protein, 6 aa, synthetic construct
RRDWGR

SEQ ID NO: 2123 - protein, 6 aa, synthetic construct
RRASDR

SEQ ID NO: 2124 - protein, 6 aa, synthetic construct
RKFNWR

SEQ ID NO: 2125 - protein, 6 aa, synthetic construct
KKAMHR

SEQ ID NO: 2126 - protein, 6 aa, synthetic construct
KRESDR

SEQ ID NO: 2127 - protein, 6 aa, synthetic construct
KRESHR

SEQ ID NO: 2128 - protein, 6 aa, synthetic construct
KRYCPK

SEQ ID NO: 2129 - protein, 6 aa, synthetic construct
RRCDHK

SEQ ID NO: 2130 - protein, 6 aa, synthetic construct
KKESNK

SEQ ID NO: 2131 - protein, 6 aa, synthetic construct
KKNWPR

SEQ ID NO: 2132 - protein, 6 aa, synthetic construct
KRFEFK

SEQ ID NO: 2133 - protein, 6 aa, synthetic construct
RRPWNR

SEQ ID NO: 2134 - protein, 6 aa, synthetic construct
KRPPGK

SEQ ID NO: 2135 - protein, 6 aa, synthetic construct
RKKDIK

SEQ ID NO: 2136 - protein, 6 aa, synthetic construct
RKETDR

SEQ ID NO: 2137 - protein, 6 aa, synthetic construct
RKPTNR

SEQ ID NO: 2138 - protein, 6 aa, synthetic construct
KKIAWK

SEQ ID NO: 2139 - protein, 6 aa, synthetic construct
KRNDFK

SEQ ID NO: 2140 - protein, 6 aa, synthetic construct
RKPEDR

SEQ ID NO: 2141 - protein, 6 aa, synthetic construct
RKTPKK

SEQ ID NO: 2142 - protein, 6 aa, synthetic construct
RRMMVR

SEQ ID NO: 2143 - protein, 6 aa, synthetic construct
KKEHDK

SEQ ID NO: 2144 - protein, 6 aa, synthetic construct
RKPAGK

SEQ ID NO: 2145 - protein, 6 aa, synthetic construct
RKTSIK

SEQ ID NO: 2146 - protein, 6 aa, synthetic construct
RRCEPR

SEQ ID NO: 2147 - protein, 6 aa, synthetic construct
KRTKGR

SEQ ID NO: 2148 - protein, 6 aa, synthetic construct
RKFTVR

SEQ ID NO: 2149 - protein, 6 aa, synthetic construct
RKEMPR

SEQ ID NO: 2150 - protein, 6 aa, synthetic construct
RKEDKR

SEQ ID NO: 2151 - protein, 6 aa, synthetic construct
RKAMDK

SEQ ID NO: 2152 - protein, 6 aa, synthetic construct
KRHDKK

SEQ ID NO: 2153 - protein, 6 aa, synthetic construct
KRTNGK

SEQ ID NO: 2154 - protein, 6 aa, synthetic construct
KKAKGR

SEQ ID NO: 2155 - protein, 6 aa, synthetic construct
RKECFK

SEQ ID NO: 2156 - protein, 6 aa, synthetic construct
KRKSNK

SEQ ID NO: 2157 - protein, 6 aa, synthetic construct
KKPPDK

SEQ ID NO: 2158 - protein, 6 aa, synthetic construct
KRYAGR

SEQ ID NO: 2159 - protein, 6 aa, synthetic construct
KKIWFR

SEQ ID NO: 2160 - protein, 6 aa, synthetic construct
KKCPFR

SEQ ID NO: 2161 - protein, 6 aa, synthetic construct
RRTWAR

SEQ ID NO: 2162 - protein, 6 aa, synthetic construct
KKNCDK

SEQ ID NO: 2163 - protein, 6 aa, synthetic construct
RREEDK

SEQ ID NO: 2164 - protein, 6 aa, synthetic construct
RKFKNK

SEQ ID NO: 2165 - protein, 6 aa, synthetic construct
KRIWDK

SEQ ID NO: 2166 - protein, 6 aa, synthetic construct
RRNSWK

SEQ ID NO: 2167 - protein, 6 aa, synthetic construct
RRTEDR

SEQ ID NO: 2168 - protein, 6 aa, synthetic construct
RREDFR

SEQ ID NO: 2169 - protein, 6 aa, synthetic construct
RKDHWR

SEQ ID NO: 2170 - protein, 6 aa, synthetic construct
RRCCAR

SEQ ID NO: 2171 - protein, 6 aa, synthetic construct
RKIEMK

SEQ ID NO: 2172 - protein, 6 aa, synthetic construct
RRHTHK

SEQ ID NO: 2173 - protein, 6 aa, synthetic construct
RRDHVK

SEQ ID NO: 2174 - protein, 6 aa, synthetic construct
RKPAHK

SEQ ID NO: 2175 - protein, 6 aa, synthetic construct
RKASIK

SEQ ID NO: 2176 - protein, 6 aa, synthetic construct
RKEMIK

SEQ ID NO: 2177 - protein, 6 aa, synthetic construct
RRPCFR

SEQ ID NO: 2178 - protein, 6 aa, synthetic construct
RRKSHK

SEQ ID NO: 2179 - protein, 6 aa, synthetic construct
RRYWEK

SEQ ID NO: 2180 - protein, 6 aa, synthetic construct
RKICAK

SEQ ID NO: 2181 - protein, 6 aa, synthetic construct
RKDDKK

SEQ ID NO: 2182 - protein, 6 aa, synthetic construct
KRCPDR

SEQ ID NO: 2183 - protein, 6 aa, synthetic construct
KRPHKK

SEQ ID NO: 2184 - protein, 6 aa, synthetic construct
KKESDK

SEQ ID NO: 2185 - protein, 6 aa, synthetic construct
KRKSER

SEQ ID NO: 2186 - protein, 6 aa, synthetic construct
KKAEEK

SEQ ID NO: 2187 - protein, 6 aa, synthetic construct
RRTEFK

SEQ ID NO: 2188 - protein, 6 aa, synthetic construct
KRYPDR

SEQ ID NO: 2189 - protein, 6 aa, synthetic construct
KRATVR

SEQ ID NO: 2190 - protein, 6 aa, synthetic construct
RRFTER

SEQ ID NO: 2191 - protein, 6 aa, synthetic construct
RKAHDK

SEQ ID NO: 2192 - protein, 6 aa, synthetic construct
RRCTAK

SEQ ID NO: 2193 - protein, 6 aa, synthetic construct
KRAHDK

SEQ ID NO: 2194 - protein, 6 aa, synthetic construct
KKHEFR

SEQ ID NO: 2195 - protein, 6 aa, synthetic construct
KRCHHR

SEQ ID NO: 2196 - protein, 6 aa, synthetic construct
RRPPWK

SEQ ID NO: 2197 - protein, 6 aa, synthetic construct
KKPTFR

SEQ ID NO: 2198 - protein, 6 aa, synthetic construct
KRNPVK

SEQ ID NO: 2199 - protein, 6 aa, synthetic construct
RKATNR

SEQ ID NO: 2200 - protein, 6 aa, synthetic construct
RKMSHR

SEQ ID NO: 2201 - skipped

SEQ ID NO: 2202 - protein, 6 aa, synthetic construct
KRIHMK

SEQ ID NO: 2203 - protein, 6 aa, synthetic construct
RKYCHR

SEQ ID NO: 2204 - protein, 6 aa, synthetic construct
RKHSHR

SEQ ID NO: 2205 - protein, 6 aa, synthetic construct
RKPPDR

SEQ ID NO: 2206 - protein, 6 aa, synthetic construct
KKDKIK

SEQ ID NO: 2207 - protein, 6 aa, synthetic construct
RKPTDR

SEQ ID NO: 2208 - protein, 6 aa, synthetic construct
RKPWAR

SEQ ID NO: 2209 - protein, 6 aa, synthetic construct
RKMSKK

SEQ ID NO: 2210 - protein, 6 aa, synthetic construct
KKPKHK

SEQ ID NO: 2211 - protein, 6 aa, synthetic construct
RKKPEK

SEQ ID NO: 2212 - protein, 6 aa, synthetic construct
RRAWVR

SEQ ID NO: 2213 - protein, 6 aa, synthetic construct
KKTTNK

SEQ ID NO: 2214 - protein, 6 aa, synthetic construct
KKNAWR

SEQ ID NO: 2215 - protein, 6 aa, synthetic construct
KREEWR

SEQ ID NO: 2216 - protein, 6 aa, synthetic construct
KRHTHR

SEQ ID NO: 2217 - protein, 6 aa, synthetic construct
KRANMK

SEQ ID NO: 2218 - protein, 6 aa, synthetic construct
KKTAFK

SEQ ID NO: 2219 - protein, 6 aa, synthetic construct
KRDAWR

SEQ ID NO: 2220 - protein, 6 aa, synthetic construct
KKMEAK

SEQ ID NO: 2221 - protein, 6 aa, synthetic construct
KKHDIK

SEQ ID NO: 2222 - protein, 6 aa, synthetic construct
RKDTVR

SEQ ID NO: 2223 - protein, 6 aa, synthetic construct
KRIMHK

SEQ ID NO: 2224 - protein, 6 aa, synthetic construct
RKTEIR

SEQ ID NO: 2225 - protein, 6 aa, synthetic construct
KRFAKR

SEQ ID NO: 2226 - protein, 6 aa, synthetic construct
RKKCER

SEQ ID NO: 2227 - protein, 6 aa, synthetic construct
KKPWHK

SEQ ID NO: 2228 - protein, 6 aa, synthetic construct
RRHCWR

SEQ ID NO: 2229 - protein, 6 aa, synthetic construct
RRCMAK

SEQ ID NO: 2230 - protein, 6 aa, synthetic construct
KKFCFR

SEQ ID NO: 2231 - protein, 6 aa, synthetic construct
RKDTHK

SEQ ID NO: 2232 - protein, 6 aa, synthetic construct
KKTSMR

SEQ ID NO: 2233 - protein, 6 aa, synthetic construct
KRHMVK

SEQ ID NO: 2234 - protein, 6 aa, synthetic construct
KKASDR

SEQ ID NO: 2235 - protein, 6 aa, synthetic construct
RRCHHR

SEQ ID NO: 2236 - protein, 6 aa, synthetic construct
KKITFR

SEQ ID NO: 2237 - protein, 6 aa, synthetic construct
RRKNNR

SEQ ID NO: 2238 - protein, 6 aa, synthetic construct
RRKKIR

SEQ ID NO: 2239 - protein, 6 aa, synthetic construct
KRADIK

SEQ ID NO: 2240 - protein, 6 aa, synthetic construct
KRIEFR

SEQ ID NO: 2241 - protein, 6 aa, synthetic construct
RKEHGK

SEQ ID NO: 2242 - protein, 6 aa, synthetic construct
KKITAR

SEQ ID NO: 2243 - protein, 6 aa, synthetic construct
KRAAHR

SEQ ID NO: 2244 - protein, 6 aa, synthetic construct
KKHHIR

SEQ ID NO: 2245 - protein, 6 aa, synthetic construct
KKTPGR

SEQ ID NO: 2246 - protein, 6 aa, synthetic construct
RKDPHR

SEQ ID NO: 2247 - protein, 6 aa, synthetic construct
RKATDK

SEQ ID NO: 2248 - protein, 6 aa, synthetic construct
RRCMMK

SEQ ID NO: 2249 - protein, 6 aa, synthetic construct
KKDHKK

SEQ ID NO: 2250 - protein, 6 aa, synthetic construct
KKMEDR

SEQ ID NO: 2251 - protein, 6 aa, synthetic construct
KKKSFK

SEQ ID NO: 2252 - protein, 6 aa, synthetic construct
KRHWIR

SEQ ID NO: 2253 - protein, 6 aa, synthetic construct
RKYTPK

SEQ ID NO: 2254 - protein, 6 aa, synthetic construct
RRMKVK

SEQ ID NO: 2255 - protein, 6 aa, synthetic construct
KRCNDK

SEQ ID NO: 2256 - protein, 6 aa, synthetic construct
RRNTAK

SEQ ID NO: 2257 - protein, 6 aa, synthetic construct
KRKPVR

SEQ ID NO: 2258 - protein, 6 aa, synthetic construct
KRFPWR

SEQ ID NO: 2259 - protein, 6 aa, synthetic construct
RRETVK

SEQ ID NO: 2260 - protein, 6 aa, synthetic construct
KRYNVR

SEQ ID NO: 2261 - protein, 6 aa, synthetic construct
RRISIR

SEQ ID NO: 2262 - protein, 6 aa, synthetic construct
RRICMR

SEQ ID NO: 2263 - protein, 6 aa, synthetic construct
KKIDHK

SEQ ID NO: 2264 - protein, 6 aa, synthetic construct
RKPTAK

SEQ ID NO: 2265 - protein, 6 aa, synthetic construct
KRDKAK

SEQ ID NO: 2266 - protein, 6 aa, synthetic construct
RKEDVK

SEQ ID NO: 2267 - protein, 6 aa, synthetic construct
RRKHWK

SEQ ID NO: 2268 - protein, 6 aa, synthetic construct
KRYHIR

SEQ ID NO: 2269 - protein, 6 aa, synthetic construct
KKIWAR

SEQ ID NO: 2270 - protein, 6 aa, synthetic construct
KKTCDK

SEQ ID NO: 2271 - protein, 6 aa, synthetic construct
RKTKAK

SEQ ID NO: 2272 - protein, 6 aa, synthetic construct
KKCTPR

SEQ ID NO: 2273 - protein, 6 aa, synthetic construct
RKYMWK

SEQ ID NO: 2274 - protein, 6 aa, synthetic construct
KRTCGR

SEQ ID NO: 2275 - protein, 6 aa, synthetic construct
KKPSVK

SEQ ID NO: 2276 - protein, 6 aa, synthetic construct
RKKEPK

SEQ ID NO: 2277 - protein, 6 aa, synthetic construct
RRKWGR

SEQ ID NO: 2278 - protein, 6 aa, synthetic construct
RRPDIK

SEQ ID NO: 2279 - protein, 6 aa, synthetic construct
RKHPVK

SEQ ID NO: 2280 - protein, 6 aa, synthetic construct
KKHNMR

SEQ ID NO: 2281 - protein, 6 aa, synthetic construct
KRPSNK

SEQ ID NO: 2282 - protein, 6 aa, synthetic construct
KKTCDR

SEQ ID NO: 2283 - protein, 6 aa, synthetic construct
KKNAVR

SEQ ID NO: 2284 - protein, 6 aa, synthetic construct
KKCCPK

SEQ ID NO: 2285 - protein, 6 aa, synthetic construct
KREAMK

SEQ ID NO: 2286 - protein, 6 aa, synthetic construct
RKEANK

SEQ ID NO: 2287 - protein, 6 aa, synthetic construct
KKPWKR

SEQ ID NO: 2288 - protein, 6 aa, synthetic construct
RRETHK

SEQ ID NO: 2289 - protein, 6 aa, synthetic construct
RKFTKK

SEQ ID NO: 2290 - protein, 6 aa, synthetic construct
KKTMWR

SEQ ID NO: 2291 - protein, 6 aa, synthetic construct
KKDDGK

SEQ ID NO: 2292 - protein, 6 aa, synthetic construct
RKYHDK

SEQ ID NO: 2293 - protein, 6 aa, synthetic construct
RRKSDR

SEQ ID NO: 2294 - protein, 6 aa, synthetic construct
RRMAIK

SEQ ID NO: 2295 - protein, 6 aa, synthetic construct
RRCHVK

SEQ ID NO: 2296 - protein, 6 aa, synthetic construct
RKPEPR

SEQ ID NO: 2297 - protein, 6 aa, synthetic construct
RKNCNK

SEQ ID NO: 2298 - protein, 6 aa, synthetic construct
RKKDMR

SEQ ID NO: 2299 - protein, 6 aa, synthetic construct
RRKTDR

SEQ ID NO: 2300 - protein, 6 aa, synthetic construct
KRMSHK

SEQ ID NO: 2301 - protein, 6 aa, synthetic construct
RRECDK

SEQ ID NO: 2302 - protein, 6 aa, synthetic construct
KRFTKK

SEQ ID NO: 2303 - protein, 6 aa, synthetic construct
KREDNK

SEQ ID NO: 2304 - protein, 6 aa, synthetic construct
KRNSAR

SEQ ID NO: 2305 - protein, 6 aa, synthetic construct
RRCTAR

SEQ ID NO: 2306 - protein, 6 aa, synthetic construct
KRFMNK

SEQ ID NO: 2307 - protein, 6 aa, synthetic construct
KRCPPR

SEQ ID NO: 2308 - protein, 6 aa, synthetic construct
RRAHNK

SEQ ID NO: 2309 - protein, 6 aa, synthetic construct
KRCCVR

SEQ ID NO: 2310 - protein, 6 aa, synthetic construct
RKFTER

SEQ ID NO: 2311 - protein, 6 aa, synthetic construct
RRASPR

SEQ ID NO: 2312 - protein, 6 aa, synthetic construct
KKDPWK

SEQ ID NO: 2313 - protein, 6 aa, synthetic construct
RRCTMK

SEQ ID NO: 2314 - protein, 6 aa, synthetic construct
KKFNFK

SEQ ID NO: 2315 - protein, 6 aa, synthetic construct
RKCAFR

SEQ ID NO: 2316 - protein, 6 aa, synthetic construct
KRHPFR

SEQ ID NO: 2317 - protein, 6 aa, synthetic construct
KKEWFR

SEQ ID NO: 2318 - protein, 6 aa, synthetic construct
KKDTIK

SEQ ID NO: 2319 - protein, 6 aa, synthetic construct
KRIWVR

SEQ ID NO: 2320 - protein, 6 aa, synthetic construct
RRKEAK

SEQ ID NO: 2321 - protein, 6 aa, synthetic construct
KKTWWR

SEQ ID NO: 2322 - protein, 6 aa, synthetic construct
RRTMGR

SEQ ID NO: 2323 - protein, 6 aa, synthetic construct
RRDNVK

SEQ ID NO: 2324 - protein, 6 aa, synthetic construct
KKDEIR

SEQ ID NO: 2325 - protein, 6 aa, synthetic construct
KKPTDR

SEQ ID NO: 2326 - protein, 6 aa, synthetic construct
RRHCDK

SEQ ID NO: 2327 - protein, 6 aa, synthetic construct
RKMMMK

SEQ ID NO: 2328 - protein, 6 aa, synthetic construct
KKKKPK

SEQ ID NO: 2329 - protein, 6 aa, synthetic construct
RKDHAR

SEQ ID NO: 2330 - protein, 6 aa, synthetic construct
RKATFR

SEQ ID NO: 2331 - protein, 6 aa, synthetic construct
RKDNIK

SEQ ID NO: 2332 - protein, 6 aa, synthetic construct
RRKAER

SEQ ID NO: 2333 - protein, 6 aa, synthetic construct
KKPNIK

SEQ ID NO: 2334 - protein, 6 aa, synthetic construct
KRMSWK

SEQ ID NO: 2335 - protein, 6 aa, synthetic construct
KKHTER

SEQ ID NO: 2336 - protein, 6 aa, synthetic construct
KKIEIK

SEQ ID NO: 2337 - protein, 6 aa, synthetic construct
KRFTDK

SEQ ID NO: 2338 - protein, 6 aa, synthetic construct
KRDCFR

SEQ ID NO: 2339 - protein, 6 aa, synthetic construct
KKMENR

SEQ ID NO: 2340 - protein, 6 aa, synthetic construct
KRATMK

SEQ ID NO: 2341 - protein, 6 aa, synthetic construct
KRNMHK

SEQ ID NO: 2342 - protein, 6 aa, synthetic construct
KKETPR

SEQ ID NO: 2343 - protein, 6 aa, synthetic construct
KRHEFK

SEQ ID NO: 2344 - protein, 6 aa, synthetic construct
KKCMGR

SEQ ID NO: 2345 - protein, 6 aa, synthetic construct
RRDCKK

SEQ ID NO: 2346 - protein, 6 aa, synthetic construct
KKMMPK

SEQ ID NO: 2347 - protein, 6 aa, synthetic construct
RKAPHR

SEQ ID NO: 2348 - protein, 6 aa, synthetic construct
RRCSHR

SEQ ID NO: 2349 - protein, 6 aa, synthetic construct
RKMTPK

SEQ ID NO: 2350 - protein, 6 aa, synthetic construct
KRKWWR

SEQ ID NO: 2351 - protein, 6 aa, synthetic construct
KKKEAK

SEQ ID NO: 2352 - protein, 6 aa, synthetic construct
RKYKEK

SEQ ID NO: 2353 - protein, 6 aa, synthetic construct
RKHNKK

SEQ ID NO: 2354 - protein, 6 aa, synthetic construct
RKCEKR

SEQ ID NO: 2355 - protein, 6 aa, synthetic construct
RKKEKR

SEQ ID NO: 2356 - protein, 6 aa, synthetic construct
KRYTVR

SEQ ID NO: 2357 - protein, 6 aa, synthetic construct
RKESVR

SEQ ID NO: 2358 - protein, 6 aa, synthetic construct
RKPMMK

SEQ ID NO: 2359 - protein, 6 aa, synthetic construct
RRAWPR

SEQ ID NO: 2360 - protein, 6 aa, synthetic construct
RRDWAK

SEQ ID NO: 2361 - protein, 6 aa, synthetic construct
KRHWVK

SEQ ID NO: 2362 - protein, 6 aa, synthetic construct
KKCDHR

SEQ ID NO: 2363 - protein, 6 aa, synthetic construct
RKCAFK

SEQ ID NO: 2364 - protein, 6 aa, synthetic construct
KKHHAK

SEQ ID NO: 2365 - protein, 6 aa, synthetic construct
RRATWR

SEQ ID NO: 2366 - protein, 6 aa, synthetic construct
KKEEKR

SEQ ID NO: 2367 - protein, 6 aa, synthetic construct
KRHMMK

SEQ ID NO: 2368 - protein, 6 aa, synthetic construct
KKEKFR

SEQ ID NO: 2369 - protein, 6 aa, synthetic construct
RKMDIR

SEQ ID NO: 2370 - protein, 6 aa, synthetic construct
KKYNPK

SEQ ID NO: 2371 - protein, 6 aa, synthetic construct
RKIAFK

SEQ ID NO: 2372 - protein, 6 aa, synthetic construct
RRFNFR

SEQ ID NO: 2373 - protein, 6 aa, synthetic construct
KKIPMK

SEQ ID NO: 2374 - protein, 6 aa, synthetic construct
RKDAIR

SEQ ID NO: 2375 - protein, 6 aa, synthetic construct
RKTWEK

SEQ ID NO: 2376 - protein, 6 aa, synthetic construct
KKADHK

SEQ ID NO: 2377 - protein, 6 aa, synthetic construct
RRHTMR

SEQ ID NO: 2378 - protein, 6 aa, synthetic construct
RKKMAK

SEQ ID NO: 2379 - protein, 6 aa, synthetic construct
KRMTPR

SEQ ID NO: 2380 - protein, 6 aa, synthetic construct
KRPPPK

SEQ ID NO: 2381 - protein, 6 aa, synthetic construct
RRMDAK

SEQ ID NO: 2382 - protein, 6 aa, synthetic construct
KKTCHR

SEQ ID NO: 2383 - protein, 6 aa, synthetic construct
RKIHNK

SEQ ID NO: 2384 - protein, 6 aa, synthetic construct
RRDTVK

SEQ ID NO: 2385 - protein, 6 aa, synthetic construct
KKEMMK

SEQ ID NO: 2386 - protein, 6 aa, synthetic construct
KKNNAK

SEQ ID NO: 2387 - protein, 6 aa, synthetic construct
RRHAHK

SEQ ID NO: 2388 - protein, 6 aa, synthetic construct
RRMNER

SEQ ID NO: 2389 - protein, 6 aa, synthetic construct
KKCHWR

SEQ ID NO: 2390 - protein, 6 aa, synthetic construct
KKCMKR

SEQ ID NO: 2391 - protein, 6 aa, synthetic construct
RKYTKK

SEQ ID NO: 2392 - protein, 6 aa, synthetic construct
RKDDDR

SEQ ID NO: 2393 - protein, 6 aa, synthetic construct
KKPTNK

SEQ ID NO: 2394 - protein, 6 aa, synthetic construct
KKTHAK

SEQ ID NO: 2395 - protein, 6 aa, synthetic construct
KRDEDK

SEQ ID NO: 2396 - protein, 6 aa, synthetic construct
KKTTGR

SEQ ID NO: 2397 - protein, 6 aa, synthetic construct
KRPMAK

SEQ ID NO: 2398 - protein, 6 aa, synthetic construct
RRATER

SEQ ID NO: 2399 - protein, 6 aa, synthetic construct
KKTNKR

SEQ ID NO: 2400 - protein, 6 aa, synthetic construct
RKACEK

SEQ ID NO: 2401 - protein, 6 aa, synthetic construct
RRRLKK

SEQ ID NO: 2402 - protein, 6 aa, synthetic construct
RWYLKR

SEQ ID NO: 2403 - protein, 6 aa, synthetic construct
KVYSRK

SEQ ID NO: 2404 - protein, 6 aa, synthetic construct
RSYYRR

SEQ ID NO: 2405 - protein, 6 aa, synthetic construct
RWVSKR

SEQ ID NO: 2406 - protein, 6 aa, synthetic construct
KSICRR

SEQ ID NO: 2407 - protein, 6 aa, synthetic construct
KSRCRK

SEQ ID NO: 2408 - protein, 6 aa, synthetic construct
KSLQKK

SEQ ID NO: 2409 - protein, 6 aa, synthetic construct
KLICRK

SEQ ID NO: 2410 - protein, 6 aa, synthetic construct
KVFSKK

SEQ ID NO: 2411 - protein, 6 aa, synthetic construct
RQYQRR

SEQ ID NO: 2412 - protein, 6 aa, synthetic construct
RQFQRK

SEQ ID NO: 2413 - protein, 6 aa, synthetic construct
RQYTRK

SEQ ID NO: 2414 - protein, 6 aa, synthetic construct
RGRQKK

SEQ ID NO: 2415 - protein, 6 aa, synthetic construct
KQVRKR

SEQ ID NO: 2416 - protein, 6 aa, synthetic construct
KGVCRR

SEQ ID NO: 2417 - protein, 6 aa, synthetic construct
RWVTRR

SEQ ID NO: 2418 - protein, 6 aa, synthetic construct
RSILRR

SEQ ID NO: 2419 - protein, 6 aa, synthetic construct
RSFSKK

SEQ ID NO: 2420 - protein, 6 aa, synthetic construct
RVQTRR

SEQ ID NO: 2421 - protein, 6 aa, synthetic construct
RLFTRK

SEQ ID NO: 2422 - protein, 6 aa, synthetic construct
RQIRKK

SEQ ID NO: 2423 - protein, 6 aa, synthetic construct
RWVRKK

SEQ ID NO: 2424 - protein, 6 aa, synthetic construct
KGIQRK

SEQ ID NO: 2425 - protein, 6 aa, synthetic construct
KQVQKR

SEQ ID NO: 2426 - protein, 6 aa, synthetic construct
RWRRKK

SEQ ID NO: 2427 - protein, 6 aa, synthetic construct
KVIRRK

SEQ ID NO: 2428 - protein, 6 aa, synthetic construct
KVLSRK

SEQ ID NO: 2429 - protein, 6 aa, synthetic construct
RSQRKR

SEQ ID NO: 2430 - protein, 6 aa, synthetic construct
RQFYKK

SEQ ID NO: 2431 - protein, 6 aa, synthetic construct
KSYQRK

SEQ ID NO: 2432 - protein, 6 aa, synthetic construct
RRLCRK

SEQ ID NO: 2433 - protein, 6 aa, synthetic construct
RQFRKK

SEQ ID NO: 2434 - protein, 6 aa, synthetic construct
KVFRRK

SEQ ID NO: 2435 - protein, 6 aa, synthetic construct
RWISRK

SEQ ID NO: 2436 - protein, 6 aa, synthetic construct
RRLQKK

SEQ ID NO: 2437 - protein, 6 aa, synthetic construct
KLLYRK

SEQ ID NO: 2438 - protein, 6 aa, synthetic construct
RSYYKR

SEQ ID NO: 2439 - protein, 6 aa, synthetic construct
RWRYRK

SEQ ID NO: 2440 - protein, 6 aa, synthetic construct
RRYRKK

SEQ ID NO: 2441 - protein, 6 aa, synthetic construct
KQLCKR

SEQ ID NO: 2442 - protein, 6 aa, synthetic construct
KLLSKR

SEQ ID NO: 2443 - protein, 6 aa, synthetic construct
RVITKR

SEQ ID NO: 2444 - protein, 6 aa, synthetic construct
KSVRRK

SEQ ID NO: 2445 - protein, 6 aa, synthetic construct
RSLTKK

SEQ ID NO: 2446 - protein, 6 aa, synthetic construct
KLYLKR

SEQ ID NO: 2447 - protein, 6 aa, synthetic construct
KLQSRR

SEQ ID NO: 2448 - protein, 6 aa, synthetic construct
RRFRKK

SEQ ID NO: 2449 - protein, 6 aa, synthetic construct
RLRCRK

SEQ ID NO: 2450 - protein, 6 aa, synthetic construct
RSQSKR

SEQ ID NO: 2451 - protein, 6 aa, synthetic construct
KQFLKK

SEQ ID NO: 2452 - protein, 6 aa, synthetic construct
KRQRKK

SEQ ID NO: 2453 - protein, 6 aa, synthetic construct
KSLSRR

SEQ ID NO: 2454 - protein, 6 aa, synthetic construct
KGRRRR

SEQ ID NO: 2455 - protein, 6 aa, synthetic construct
RLFYKK

SEQ ID NO: 2456 - protein, 6 aa, synthetic construct
RSQLRR

SEQ ID NO: 2457 - protein, 6 aa, synthetic construct
KQRCRR

SEQ ID NO: 2458 - protein, 6 aa, synthetic construct
KRLQRK

SEQ ID NO: 2459 - protein, 6 aa, synthetic construct
RVLSRK

SEQ ID NO: 2460 - protein, 6 aa, synthetic construct
RRLSKK

SEQ ID NO: 2461 - protein, 6 aa, synthetic construct
RGFQRK

SEQ ID NO: 2462 - protein, 6 aa, synthetic construct
RLVTKR

SEQ ID NO: 2463 - protein, 6 aa, synthetic construct
KSFRKR

SEQ ID NO: 2464 - protein, 6 aa, synthetic construct
KSVSKK

SEQ ID NO: 2465 - protein, 6 aa, synthetic construct
KGVCKR

SEQ ID NO: 2466 - protein, 6 aa, synthetic construct
RVIRRR

SEQ ID NO: 2467 - protein, 6 aa, synthetic construct
KLFCKK

SEQ ID NO: 2468 - protein, 6 aa, synthetic construct
KGRRRK

SEQ ID NO: 2469 - protein, 6 aa, synthetic construct
KWFLRK

SEQ ID NO: 2470 - protein, 6 aa, synthetic construct
KRLLRK

SEQ ID NO: 2471 - protein, 6 aa, synthetic construct
KQVYKR

SEQ ID NO: 2472 - protein, 6 aa, synthetic construct
KRIQKK

SEQ ID NO: 2473 - protein, 6 aa, synthetic construct
RLYTKR

SEQ ID NO: 2474 - protein, 6 aa, synthetic construct
RWIYKR

SEQ ID NO: 2475 - protein, 6 aa, synthetic construct
KLYTRK

SEQ ID NO: 2476 - protein, 6 aa, synthetic construct
RRQSRK

SEQ ID NO: 2477 - protein, 6 aa, synthetic construct
KQQTRR

SEQ ID NO: 2478 - protein, 6 aa, synthetic construct
KRYLKR

SEQ ID NO: 2479 - protein, 6 aa, synthetic construct
RQLSKR

SEQ ID NO: 2480 - protein, 6 aa, synthetic construct
RRQYKR

SEQ ID NO: 2481 - protein, 6 aa, synthetic construct
RRVSRR

SEQ ID NO: 2482 - protein, 6 aa, synthetic construct
RGVQKK

SEQ ID NO: 2483 - protein, 6 aa, synthetic construct
KQYQRR

SEQ ID NO: 2484 - protein, 6 aa, synthetic construct
KQRYKK

SEQ ID NO: 2485 - protein, 6 aa, synthetic construct
KSQYKR

SEQ ID NO: 2486 - protein, 6 aa, synthetic construct
KQFRRK

SEQ ID NO: 2487 - protein, 6 aa, synthetic construct
RRLTKR

SEQ ID NO: 2488 - protein, 6 aa, synthetic construct
KSFQRR

SEQ ID NO: 2489 - protein, 6 aa, synthetic construct
KSRSKK

SEQ ID NO: 2490 - protein, 6 aa, synthetic construct
KGRTKR

SEQ ID NO: 2491 - protein, 6 aa, synthetic construct
KWIYKR

SEQ ID NO: 2492 - protein, 6 aa, synthetic construct
KVVCKR

SEQ ID NO: 2493 - protein, 6 aa, synthetic construct
RWQTRR

SEQ ID NO: 2494 - protein, 6 aa, synthetic construct
RLYQRK

SEQ ID NO: 2495 - protein, 6 aa, synthetic construct
RRIYRK

SEQ ID NO: 2496 - protein, 6 aa, synthetic construct
KWRQRK

SEQ ID NO: 2497 - protein, 6 aa, synthetic construct
RQFYRK

SEQ ID NO: 2498 - protein, 6 aa, synthetic construct
RRQQRR

SEQ ID NO: 2499 - protein, 6 aa, synthetic construct
RQRSRR

SEQ ID NO: 2500 - protein, 6 aa, synthetic construct
RRRCRR

SEQ ID NO: 2501 - protein, 6 aa, synthetic construct
RLICRK

SEQ ID NO: 2502 - protein, 6 aa, synthetic construct
KVYQKK

SEQ ID NO: 2503 - protein, 6 aa, synthetic construct
RVVTKK

SEQ ID NO: 2504 - protein, 6 aa, synthetic construct
RGVCRK

SEQ ID NO: 2505 - protein, 6 aa, synthetic construct
RGFTRR

SEQ ID NO: 2506 - protein, 6 aa, synthetic construct
RWVQRK

SEQ ID NO: 2507 - protein, 6 aa, synthetic construct
RGVYRK

SEQ ID NO: 2508 - protein, 6 aa, synthetic construct
RVVYKK

SEQ ID NO: 2509 - protein, 6 aa, synthetic construct
RRVYRK

SEQ ID NO: 2510 - protein, 6 aa, synthetic construct
KSQLKK

SEQ ID NO: 2511 - protein, 6 aa, synthetic construct
KLIRRK

SEQ ID NO: 2512 - protein, 6 aa, synthetic construct
RLQQKR

SEQ ID NO: 2513 - protein, 6 aa, synthetic construct
KRYSRK

SEQ ID NO: 2514 - protein, 6 aa, synthetic construct
KLQYRK

SEQ ID NO: 2515 - protein, 6 aa, synthetic construct
KWQYRK

SEQ ID NO: 2516 - protein, 6 aa, synthetic construct
KLQRKK

SEQ ID NO: 2517 - protein, 6 aa, synthetic construct
KRYTRK

SEQ ID NO: 2518 - protein, 6 aa, synthetic construct
KWFSRR

SEQ ID NO: 2519 - protein, 6 aa, synthetic construct
RSISKK

SEQ ID NO: 2520 - protein, 6 aa, synthetic construct
RRQCRK

SEQ ID NO: 2521 - protein, 6 aa, synthetic construct
KRVYRK

SEQ ID NO: 2522 - protein, 6 aa, synthetic construct
RVITKK

SEQ ID NO: 2523 - protein, 6 aa, synthetic construct
RQFTKR

SEQ ID NO: 2524 - protein, 6 aa, synthetic construct
KWQLKR

SEQ ID NO: 2525 - protein, 6 aa, synthetic construct
KVQLRR

SEQ ID NO: 2526 - protein, 6 aa, synthetic construct
KWLYRR

SEQ ID NO: 2527 - protein, 6 aa, synthetic construct
RLYLRK

SEQ ID NO: 2528 - protein, 6 aa, synthetic construct
KSYYRR

SEQ ID NO: 2529 - protein, 6 aa, synthetic construct
KSVLRK

SEQ ID NO: 2530 - protein, 6 aa, synthetic construct
RGVCRR

SEQ ID NO: 2531 - protein, 6 aa, synthetic construct
KQQTKR

SEQ ID NO: 2532 - protein, 6 aa, synthetic construct
KLYCKK

SEQ ID NO: 2533 - protein, 6 aa, synthetic construct
KRRLKK

SEQ ID NO: 2534 - protein, 6 aa, synthetic construct
RLFQRK

SEQ ID NO: 2535 - protein, 6 aa, synthetic construct
RWFYKK

SEQ ID NO: 2536 - protein, 6 aa, synthetic construct
RWRYKR

SEQ ID NO: 2537 - protein, 6 aa, synthetic construct
KVFCKK

SEQ ID NO: 2538 - protein, 6 aa, synthetic construct
KQRRRK

SEQ ID NO: 2539 - protein, 6 aa, synthetic construct
KLFRKK

SEQ ID NO: 2540 - protein, 6 aa, synthetic construct
KGRLKK

SEQ ID NO: 2541 - protein, 6 aa, synthetic construct
KWYQKK

SEQ ID NO: 2542 - protein, 6 aa, synthetic construct
RWVLRR

SEQ ID NO: 2543 - protein, 6 aa, synthetic construct
RRVCRR

SEQ ID NO: 2544 - protein, 6 aa, synthetic construct
KSIRRK

SEQ ID NO: 2545 - protein, 6 aa, synthetic construct
RQYYKK

SEQ ID NO: 2546 - protein, 6 aa, synthetic construct
KQLLKR

SEQ ID NO: 2547 - protein, 6 aa, synthetic construct
RQYTKR

SEQ ID NO: 2548 - protein, 6 aa, synthetic construct
KGQYKK

SEQ ID NO: 2549 - protein, 6 aa, synthetic construct
KGQQRK

SEQ ID NO: 2550 - protein, 6 aa, synthetic construct
KRILKR

SEQ ID NO: 2551 - protein, 6 aa, synthetic construct
KQLRKR

SEQ ID NO: 2552 - protein, 6 aa, synthetic construct
RQFYKR

SEQ ID NO: 2553 - protein, 6 aa, synthetic construct
RVYSRR

SEQ ID NO: 2554 - protein, 6 aa, synthetic construct
KRVTKR

SEQ ID NO: 2555 - protein, 6 aa, synthetic construct
KGVYKK

SEQ ID NO: 2556 - protein, 6 aa, synthetic construct
KGLQRR

SEQ ID NO: 2557 - protein, 6 aa, synthetic construct
RSYRKK

SEQ ID NO: 2558 - protein, 6 aa, synthetic construct
RSFLRR

SEQ ID NO: 2559 - protein, 6 aa, synthetic construct
RQYYRK

SEQ ID NO: 2560 - protein, 6 aa, synthetic construct
RVRRKK

SEQ ID NO: 2561 - protein, 6 aa, synthetic construct
KWRRKK

SEQ ID NO: 2562 - protein, 6 aa, synthetic construct
KVISKR

SEQ ID NO: 2563 - protein, 6 aa, synthetic construct
KWFYRR

SEQ ID NO: 2564 - protein, 6 aa, synthetic construct
KRQRRK

SEQ ID NO: 2565 - protein, 6 aa, synthetic construct
KWFTRR

SEQ ID NO: 2566 - protein, 6 aa, synthetic construct
RWLRKR

SEQ ID NO: 2567 - protein, 6 aa, synthetic construct
KLFQKR

SEQ ID NO: 2568 - protein, 6 aa, synthetic construct
RVFLKR

SEQ ID NO: 2569 - protein, 6 aa, synthetic construct
KRQSRR

SEQ ID NO: 2570 - protein, 6 aa, synthetic construct
RQYQKK

SEQ ID NO: 2571 - protein, 6 aa, synthetic construct
RQQTRR

SEQ ID NO: 2572 - protein, 6 aa, synthetic construct
KVIRKK

SEQ ID NO: 2573 - protein, 6 aa, synthetic construct
RQQCKK

SEQ ID NO: 2574 - protein, 6 aa, synthetic construct
KLLRKR

SEQ ID NO: 2575 - protein, 6 aa, synthetic construct
KVYLRK

SEQ ID NO: 2576 - protein, 6 aa, synthetic construct
RWIYRR

SEQ ID NO: 2577 - protein, 6 aa, synthetic construct
RSVTKK

SEQ ID NO: 2578 - protein, 6 aa, synthetic construct
KWLLRR

SEQ ID NO: 2579 - protein, 6 aa, synthetic construct
RRVYRR

SEQ ID NO: 2580 - protein, 6 aa, synthetic construct
RLRLKR

SEQ ID NO: 2581 - protein, 6 aa, synthetic construct
RWQQKK

SEQ ID NO: 2582 - protein, 6 aa, synthetic construct
KLFYKK

SEQ ID NO: 2583 - protein, 6 aa, synthetic construct
RLQLRR

SEQ ID NO: 2584 - protein, 6 aa, synthetic construct
KWVSRR

SEQ ID NO: 2585 - protein, 6 aa, synthetic construct
RGYQKR

SEQ ID NO: 2586 - protein, 6 aa, synthetic construct
KQICRK

SEQ ID NO: 2587 - protein, 6 aa, synthetic construct
KRRRRK

SEQ ID NO: 2588 - protein, 6 aa, synthetic construct
RGYTKR

SEQ ID NO: 2589 - protein, 6 aa, synthetic construct
RWQCKK

SEQ ID NO: 2590 - protein, 6 aa, synthetic construct
KVYLKR

SEQ ID NO: 2591 - protein, 6 aa, synthetic construct
RQLLKR

SEQ ID NO: 2592 - protein, 6 aa, synthetic construct
RWFSKK

SEQ ID NO: 2593 - protein, 6 aa, synthetic construct
KWISKR

SEQ ID NO: 2594 - protein, 6 aa, synthetic construct
KLRLRK

SEQ ID NO: 2595 - protein, 6 aa, synthetic construct
KSRQKR

SEQ ID NO: 2596 - protein, 6 aa, synthetic construct
KSQRKK

SEQ ID NO: 2597 - protein, 6 aa, synthetic construct
RGQYRR

SEQ ID NO: 2598 - protein, 6 aa, synthetic construct
KWYYRK

SEQ ID NO: 2599 - protein, 6 aa, synthetic construct
RGQYKR

SEQ ID NO: 2600 - protein, 6 aa, synthetic construct
RGVQRK

SEQ ID NO: 2601 - protein, 6 aa, synthetic construct
KLFLRR

SEQ ID NO: 2602 - protein, 6 aa, synthetic construct
RLIYKK

SEQ ID NO: 2603 - protein, 6 aa, synthetic construct
KSRTKR

SEQ ID NO: 2604 - protein, 6 aa, synthetic construct
RRVQKR

SEQ ID NO: 2605 - protein, 6 aa, synthetic construct
KSFQRK

SEQ ID NO: 2606 - protein, 6 aa, synthetic construct
KWQYKK

SEQ ID NO: 2607 - protein, 6 aa, synthetic construct
KWVSKR

SEQ ID NO: 2608 - protein, 6 aa, synthetic construct
RSQQRK

SEQ ID NO: 2609 - protein, 6 aa, synthetic construct
RLYYRK

SEQ ID NO: 2610 - protein, 6 aa, synthetic construct
RSQSRR

SEQ ID NO: 2611 - protein, 6 aa, synthetic construct
RGLSRR

SEQ ID NO: 2612 - protein, 6 aa, synthetic construct
KWQLRR

SEQ ID NO: 2613 - protein, 6 aa, synthetic construct
KSILRR

SEQ ID NO: 2614 - protein, 6 aa, synthetic construct
RWRSRK

SEQ ID NO: 2615 - protein, 6 aa, synthetic construct
RLYYRR

SEQ ID NO: 2616 - protein, 6 aa, synthetic construct
KGILKK

SEQ ID NO: 2617 - protein, 6 aa, synthetic construct
KLFQKK

SEQ ID NO: 2618 - protein, 6 aa, synthetic construct
KGVSKK

SEQ ID NO: 2619 - protein, 6 aa, synthetic construct
RGVSKR

SEQ ID NO: 2620 - protein, 6 aa, synthetic construct
KVYSKR

SEQ ID NO: 2621 - protein, 6 aa, synthetic construct
KQVRKK

SEQ ID NO: 2622 - protein, 6 aa, synthetic construct
RVVYRK

SEQ ID NO: 2623 - protein, 6 aa, synthetic construct
KQLTRR

SEQ ID NO: 2624 - protein, 6 aa, synthetic construct
RLFLKR

SEQ ID NO: 2625 - protein, 6 aa, synthetic construct
KRLLRR

SEQ ID NO: 2626 - protein, 6 aa, synthetic construct
RLLCKR

SEQ ID NO: 2627 - protein, 6 aa, synthetic construct
KLQRRK

SEQ ID NO: 2628 - protein, 6 aa, synthetic construct
KGQCKK

SEQ ID NO: 2629 - protein, 6 aa, synthetic construct
RWQSKK

SEQ ID NO: 2630 - protein, 6 aa, synthetic construct
RWIQRR

SEQ ID NO: 2631 - protein, 6 aa, synthetic construct
KGISKK

SEQ ID NO: 2632 - protein, 6 aa, synthetic construct
KQFTRK

SEQ ID NO: 2633 - protein, 6 aa, synthetic construct
KWRQKR

SEQ ID NO: 2634 - protein, 6 aa, synthetic construct
RSQTKR

SEQ ID NO: 2635 - protein, 6 aa, synthetic construct
KLVRKK

SEQ ID NO: 2636 - protein, 6 aa, synthetic construct
KWQQKK

SEQ ID NO: 2637 - protein, 6 aa, synthetic construct
RLVYKR

SEQ ID NO: 2638 - protein, 6 aa, synthetic construct
RRRRRK

SEQ ID NO: 2639 - protein, 6 aa, synthetic construct
RGQYKK

SEQ ID NO: 2640 - protein, 6 aa, synthetic construct
RRRCRK

SEQ ID NO: 2641 - protein, 6 aa, synthetic construct
KQLTKR

SEQ ID NO: 2642 - protein, 6 aa, synthetic construct
KSQRRR

SEQ ID NO: 2643 - protein, 6 aa, synthetic construct
KRVLKR

SEQ ID NO: 2644 - protein, 6 aa, synthetic construct
RRFSKR

SEQ ID NO: 2645 - protein, 6 aa, synthetic construct
RSLSKR

SEQ ID NO: 2646 - protein, 6 aa, synthetic construct
KWISKK

SEQ ID NO: 2647 - protein, 6 aa, synthetic construct
KGYQKK

SEQ ID NO: 2648 - protein, 6 aa, synthetic construct
RSYTRR

SEQ ID NO: 2649 - protein, 6 aa, synthetic construct
RGLRKR

SEQ ID NO: 2650 - protein, 6 aa, synthetic construct
KRRRKK

SEQ ID NO: 2651 - protein, 6 aa, synthetic construct
KSQTKR

SEQ ID NO: 2652 - protein, 6 aa, synthetic construct
KVFRKK

SEQ ID NO: 2653 - protein, 6 aa, synthetic construct
KLRSRR

SEQ ID NO: 2654 - protein, 6 aa, synthetic construct
KRIQRR

SEQ ID NO: 2655 - protein, 6 aa, synthetic construct
RLRRKK

SEQ ID NO: 2656 - protein, 6 aa, synthetic construct
KSQQKR

SEQ ID NO: 2657 - protein, 6 aa, synthetic construct
KRFCRK

SEQ ID NO: 2658 - protein, 6 aa, synthetic construct
KRIYRR

SEQ ID NO: 2659 - protein, 6 aa, synthetic construct
RVQSKR

SEQ ID NO: 2660 - protein, 6 aa, synthetic construct
RRFCKR

SEQ ID NO: 2661 - protein, 6 aa, synthetic construct
RWYTKK

SEQ ID NO: 2662 - protein, 6 aa, synthetic construct
KWILKR

SEQ ID NO: 2663 - protein, 6 aa, synthetic construct
RRICKR

SEQ ID NO: 2664 - protein, 6 aa, synthetic construct
KSQLKR

SEQ ID NO: 2665 - protein, 6 aa, synthetic construct
RRQTRK

SEQ ID NO: 2666 - protein, 6 aa, synthetic construct
RWQTKK

SEQ ID NO: 2667 - protein, 6 aa, synthetic construct
KLYSRR

SEQ ID NO: 2668 - protein, 6 aa, synthetic construct
RQICKK

SEQ ID NO: 2669 - protein, 6 aa, synthetic construct
KWVQRK

SEQ ID NO: 2670 - protein, 6 aa, synthetic construct
KSRLRR

SEQ ID NO: 2671 - protein, 6 aa, synthetic construct
RLFQKK

SEQ ID NO: 2672 - protein, 6 aa, synthetic construct
KWRSRK

SEQ ID NO: 2673 - protein, 6 aa, synthetic construct
KLRQRR

SEQ ID NO: 2674 - protein, 6 aa, synthetic construct
KLRTKR

SEQ ID NO: 2675 - protein, 6 aa, synthetic construct
KLITRR

SEQ ID NO: 2676 - protein, 6 aa, synthetic construct
RLVCRK

SEQ ID NO: 2677 - protein, 6 aa, synthetic construct
RLRYRK

SEQ ID NO: 2678 - protein, 6 aa, synthetic construct
RQIQKK

SEQ ID NO: 2679 - protein, 6 aa, synthetic construct
KSLQRK

SEQ ID NO: 2680 - protein, 6 aa, synthetic construct
KSIYRR

SEQ ID NO: 2681 - protein, 6 aa, synthetic construct
KGQRKK

SEQ ID NO: 2682 - protein, 6 aa, synthetic construct
RQQYRK

SEQ ID NO: 2683 - protein, 6 aa, synthetic construct
KLISKR

SEQ ID NO: 2684 - protein, 6 aa, synthetic construct
KLRSKR

SEQ ID NO: 2685 - protein, 6 aa, synthetic construct
RRIQRR

SEQ ID NO: 2686 - protein, 6 aa, synthetic construct
KRRYKK

SEQ ID NO: 2687 - protein, 6 aa, synthetic construct
RLYLKR

SEQ ID NO: 2688 - protein, 6 aa, synthetic construct
KSRLRK

SEQ ID NO: 2689 - protein, 6 aa, synthetic construct
RLLQKK

SEQ ID NO: 2690 - protein, 6 aa, synthetic construct
RQLYRK

SEQ ID NO: 2691 - protein, 6 aa, synthetic construct
RRYRKR

SEQ ID NO: 2692 - protein, 6 aa, synthetic construct
RQLCKR

SEQ ID NO: 2693 - protein, 6 aa, synthetic construct
KQQSKR

SEQ ID NO: 2694 - protein, 6 aa, synthetic construct
KLYYRR

SEQ ID NO: 2695 - protein, 6 aa, synthetic construct
KVRYKK

SEQ ID NO: 2696 - protein, 6 aa, synthetic construct
KWYRRK

SEQ ID NO: 2697 - protein, 6 aa, synthetic construct
RSLSRR

SEQ ID NO: 2698 - protein, 6 aa, synthetic construct
KWICKK

SEQ ID NO: 2699 - protein, 6 aa, synthetic construct
RWYYRK

SEQ ID NO: 2700 - protein, 6 aa, synthetic construct
RWRLKK

SEQ ID NO: 2701 - protein, 6 aa, synthetic construct
RQVRKR

SEQ ID NO: 2702 - protein, 6 aa, synthetic construct
KQICKK

SEQ ID NO: 2703 - protein, 6 aa, synthetic construct
KVFTKR

SEQ ID NO: 2704 - protein, 6 aa, synthetic construct
KWFYRK

SEQ ID NO: 2705 - protein, 6 aa, synthetic construct
KQFYKK

SEQ ID NO: 2706 - protein, 6 aa, synthetic construct
RQFQKR

SEQ ID NO: 2707 - protein, 6 aa, synthetic construct
RLRSKK

SEQ ID NO: 2708 - protein, 6 aa, synthetic construct
KGISKR

SEQ ID NO: 2709 - protein, 6 aa, synthetic construct
KRRRRR

SEQ ID NO: 2710 - protein, 6 aa, synthetic construct
KLFQRK

SEQ ID NO: 2711 - protein, 6 aa, synthetic construct
KVVTRK

SEQ ID NO: 2712 - protein, 6 aa, synthetic construct
KWRTKR

SEQ ID NO: 2713 - protein, 6 aa, synthetic construct
RWRTKR

SEQ ID NO: 2714 - protein, 6 aa, synthetic construct
KQYCKK

SEQ ID NO: 2715 - protein, 6 aa, synthetic construct
RRQRRR

SEQ ID NO: 2716 - protein, 6 aa, synthetic construct
KGIRRR

SEQ ID NO: 2717 - protein, 6 aa, synthetic construct
RGLYKR

SEQ ID NO: 2718 - protein, 6 aa, synthetic construct
RGIQKK

SEQ ID NO: 2719 - protein, 6 aa, synthetic construct
RSRQRK

SEQ ID NO: 2720 - protein, 6 aa, synthetic construct
RQYRRK

SEQ ID NO: 2721 - protein, 6 aa, synthetic construct
KLVSRK

SEQ ID NO: 2722 - protein, 6 aa, synthetic construct
RRYSRR

SEQ ID NO: 2723 - protein, 6 aa, synthetic construct
KVLLRK

SEQ ID NO: 2724 - protein, 6 aa, synthetic construct
KLQSRK

SEQ ID NO: 2725 - protein, 6 aa, synthetic construct
RVFSRK

SEQ ID NO: 2726 - protein, 6 aa, synthetic construct
RGFYKK

SEQ ID NO: 2727 - protein, 6 aa, synthetic construct
KGLRKR

SEQ ID NO: 2728 - protein, 6 aa, synthetic construct
KRYQRK

SEQ ID NO: 2729 - protein, 6 aa, synthetic construct
RVYTKR

SEQ ID NO: 2730 - protein, 6 aa, synthetic construct
KQLRKK

SEQ ID NO: 2731 - protein, 6 aa, synthetic construct
RWVSKK

SEQ ID NO: 2732 - protein, 6 aa, synthetic construct
RRQYKK

SEQ ID NO: 2733 - protein, 6 aa, synthetic construct
KRFRRK

SEQ ID NO: 2734 - protein, 6 aa, synthetic construct
KVILRR

SEQ ID NO: 2735 - protein, 6 aa, synthetic construct
KWRSRR

SEQ ID NO: 2736 - protein, 6 aa, synthetic construct
KLITKR

SEQ ID NO: 2737 - protein, 6 aa, synthetic construct
KQFQKK

SEQ ID NO: 2738 - protein, 6 aa, synthetic construct
RSVQKR

SEQ ID NO: 2739 - protein, 6 aa, synthetic construct
KQVYKK

SEQ ID NO: 2740 - protein, 6 aa, synthetic construct
RRLTRR

SEQ ID NO: 2741 - protein, 6 aa, synthetic construct
KVVTKR

SEQ ID NO: 2742 - protein, 6 aa, synthetic construct
KRYRKK

SEQ ID NO: 2743 - protein, 6 aa, synthetic construct
KQISKK

SEQ ID NO: 2744 - protein, 6 aa, synthetic construct
KGIRRK

SEQ ID NO: 2745 - protein, 6 aa, synthetic construct
KSRQKK

SEQ ID NO: 2746 - protein, 6 aa, synthetic construct
KRFSKK

SEQ ID NO: 2747 - protein, 6 aa, synthetic construct
RRYSKK

SEQ ID NO: 2748 - protein, 6 aa, synthetic construct
KSQLRR

SEQ ID NO: 2749 - protein, 6 aa, synthetic construct
RRLSRR

SEQ ID NO: 2750 - protein, 6 aa, synthetic construct
RGQTRK

SEQ ID NO: 2751 - protein, 6 aa, synthetic construct
KLYTKR

SEQ ID NO: 2752 - protein, 6 aa, synthetic construct
RWFYRR

SEQ ID NO: 2753 - protein, 6 aa, synthetic construct
RLQTKK

SEQ ID NO: 2754 - protein, 6 aa, synthetic construct
RWISKK

SEQ ID NO: 2755 - protein, 6 aa, synthetic construct
RGIRKK

SEQ ID NO: 2756 - protein, 6 aa, synthetic construct
RLLQRR

SEQ ID NO: 2757 - protein, 6 aa, synthetic construct
RGQRKK

SEQ ID NO: 2758 - protein, 6 aa, synthetic construct
RQIYKK

SEQ ID NO: 2759 - protein, 6 aa, synthetic construct
RLFCKK

SEQ ID NO: 2760 - protein, 6 aa, synthetic construct
KGVRRR

SEQ ID NO: 2761 - protein, 6 aa, synthetic construct
RSFQRR

SEQ ID NO: 2762 - protein, 6 aa, synthetic construct
RGRQKR

SEQ ID NO: 2763 - protein, 6 aa, synthetic construct
KSIYRK

SEQ ID NO: 2764 - protein, 6 aa, synthetic construct
KVFTKK

SEQ ID NO: 2765 - protein, 6 aa, synthetic construct
RWRYRR

SEQ ID NO: 2766 - protein, 6 aa, synthetic construct
KQYYRR

SEQ ID NO: 2767 - protein, 6 aa, synthetic construct
RWRSRR

SEQ ID NO: 2768 - protein, 6 aa, synthetic construct
RLRTRR

SEQ ID NO: 2769 - protein, 6 aa, synthetic construct
KVVRRR

SEQ ID NO: 2770 - protein, 6 aa, synthetic construct
KSLLRR

SEQ ID NO: 2771 - protein, 6 aa, synthetic construct
KRLSRR

SEQ ID NO: 2772 - protein, 6 aa, synthetic construct
KLVQRR

SEQ ID NO: 2773 - protein, 6 aa, synthetic construct
KLIYRK

SEQ ID NO: 2774 - protein, 6 aa, synthetic construct
KRQLKK

SEQ ID NO: 2775 - protein, 6 aa, synthetic construct
RVVQKK

SEQ ID NO: 2776 - protein, 6 aa, synthetic construct
KQQCKR

SEQ ID NO: 2777 - protein, 6 aa, synthetic construct
RRYCRR

SEQ ID NO: 2778 - protein, 6 aa, synthetic construct
KRFQRK

SEQ ID NO: 2779 - protein, 6 aa, synthetic construct
RGVQKR

SEQ ID NO: 2780 - protein, 6 aa, synthetic construct
RLVYRK

SEQ ID NO: 2781 - protein, 6 aa, synthetic construct
KVYRRR

SEQ ID NO: 2782 - protein, 6 aa, synthetic construct
KSVSRR

SEQ ID NO: 2783 - protein, 6 aa, synthetic construct
KLVRRK

SEQ ID NO: 2784 - protein, 6 aa, synthetic construct
RSFQKK

SEQ ID NO: 2785 - protein, 6 aa, synthetic construct
RGVCKR

SEQ ID NO: 2786 - protein, 6 aa, synthetic construct
KWQSKR

SEQ ID NO: 2787 - protein, 6 aa, synthetic construct
KWLCKK

SEQ ID NO: 2788 - protein, 6 aa, synthetic construct
KRFQKK

SEQ ID NO: 2789 - protein, 6 aa, synthetic construct
KSLYKK

SEQ ID NO: 2790 - protein, 6 aa, synthetic construct
KWLRRR

SEQ ID NO: 2791 - protein, 6 aa, synthetic construct
KQYQKR

SEQ ID NO: 2792 - protein, 6 aa, synthetic construct
RQILKR

SEQ ID NO: 2793 - protein, 6 aa, synthetic construct
RGLQRK

SEQ ID NO: 2794 - protein, 6 aa, synthetic construct
KLVLKR

SEQ ID NO: 2795 - protein, 6 aa, synthetic construct
KWRYRR

SEQ ID NO: 2796 - protein, 6 aa, synthetic construct
KWLQRR

SEQ ID NO: 2797 - protein, 6 aa, synthetic construct
RSIYRK

SEQ ID NO: 2798 - protein, 6 aa, synthetic construct
RQQRRR

SEQ ID NO: 2799 - protein, 6 aa, synthetic construct
RWLTRR

SEQ ID NO: 2800 - protein, 6 aa, synthetic construct
RQIRRR

SEQ ID NO: 2801 - protein, 6 aa, synthetic construct
RSILRK

SEQ ID NO: 2802 - protein, 6 aa, synthetic construct
KRYSRR

SEQ ID NO: 2803 - protein, 6 aa, synthetic construct
KGVLRK

SEQ ID NO: 2804 - protein, 6 aa, synthetic construct
RVLSKR

SEQ ID NO: 2805 - protein, 6 aa, synthetic construct
KGYRKK

SEQ ID NO: 2806 - protein, 6 aa, synthetic construct
KGIYRR

SEQ ID NO: 2807 - protein, 6 aa, synthetic construct
KQVSKR

SEQ ID NO: 2808 - protein, 6 aa, synthetic construct
KQIYRR

SEQ ID NO: 2809 - protein, 6 aa, synthetic construct
KRRRKR

SEQ ID NO: 2810 - protein, 6 aa, synthetic construct
KRFRKK

SEQ ID NO: 2811 - protein, 6 aa, synthetic construct
RSRQKK

SEQ ID NO: 2812 - protein, 6 aa, synthetic construct
KRFLKK

SEQ ID NO: 2813 - protein, 6 aa, synthetic construct
RLILKR

SEQ ID NO: 2814 - protein, 6 aa, synthetic construct
KWRQKK

SEQ ID NO: 2815 - protein, 6 aa, synthetic construct
KGRCKK

SEQ ID NO: 2816 - protein, 6 aa, synthetic construct
RWRLRR

SEQ ID NO: 2817 - protein, 6 aa, synthetic construct
RWVYKK

SEQ ID NO: 2818 - protein, 6 aa, synthetic construct
RVQYKK

SEQ ID NO: 2819 - protein, 6 aa, synthetic construct
RSRYKK

SEQ ID NO: 2820 - protein, 6 aa, synthetic construct
RRQYRK

SEQ ID NO: 2821 - protein, 6 aa, synthetic construct
KVICRK

SEQ ID NO: 2822 - protein, 6 aa, synthetic construct
RLITRR

SEQ ID NO: 2823 - protein, 6 aa, synthetic construct
RLQYRK

SEQ ID NO: 2824 - protein, 6 aa, synthetic construct
RLYCKK

SEQ ID NO: 2825 - protein, 6 aa, synthetic construct
KLQTKK

SEQ ID NO: 2826 - protein, 6 aa, synthetic construct
KGQRRK

SEQ ID NO: 2827 - protein, 6 aa, synthetic construct
RLQRRR

SEQ ID NO: 2828 - protein, 6 aa, synthetic construct
KVFLKK

SEQ ID NO: 2829 - protein, 6 aa, synthetic construct
RWRQRK

SEQ ID NO: 2830 - protein, 6 aa, synthetic construct
RWFRRR

SEQ ID NO: 2831 - protein, 6 aa, synthetic construct
KLILKR

SEQ ID NO: 2832 - protein, 6 aa, synthetic construct
KVVRKR

SEQ ID NO: 2833 - protein, 6 aa, synthetic construct
RWIQKR

SEQ ID NO: 2834 - protein, 6 aa, synthetic construct
RVIRRK

SEQ ID NO: 2835 - protein, 6 aa, synthetic construct
RWVYKR

SEQ ID NO: 2836 - protein, 6 aa, synthetic construct
KVLYKR

SEQ ID NO: 2837 - protein, 6 aa, synthetic construct
KQVCKK

SEQ ID NO: 2838 - protein, 6 aa, synthetic construct
RLLCRK

SEQ ID NO: 2839 - protein, 6 aa, synthetic construct
KWFSKR

SEQ ID NO: 2840 - protein, 6 aa, synthetic construct
KQLSKK

SEQ ID NO: 2841 - protein, 6 aa, synthetic construct
KSQRKR

SEQ ID NO: 2842 - protein, 6 aa, synthetic construct
RLVQKR

SEQ ID NO: 2843 - protein, 6 aa, synthetic construct
RQYCRR

SEQ ID NO: 2844 - protein, 6 aa, synthetic construct
RQRLKK

SEQ ID NO: 2845 - protein, 6 aa, synthetic construct
RLVCKR

SEQ ID NO: 2846 - protein, 6 aa, synthetic construct
RQLQKK

SEQ ID NO: 2847 - protein, 6 aa, synthetic construct
RVYTKK

SEQ ID NO: 2848 - protein, 6 aa, synthetic construct
RSFRRR

SEQ ID NO: 2849 - protein, 6 aa, synthetic construct
RGRCRR

SEQ ID NO: 2850 - protein, 6 aa, synthetic construct
RQRYRK

SEQ ID NO: 2851 - protein, 6 aa, synthetic construct
RGRCKK

SEQ ID NO: 2852 - protein, 6 aa, synthetic construct
KGLYKR

SEQ ID NO: 2853 - protein, 6 aa, synthetic construct
RLVRKK

SEQ ID NO: 2854 - protein, 6 aa, synthetic construct
RSVQKK

SEQ ID NO: 2855 - protein, 6 aa, synthetic construct
RWYSKR

SEQ ID NO: 2856 - protein, 6 aa, synthetic construct
KSVTKR

SEQ ID NO: 2857 - protein, 6 aa, synthetic construct
RRVYKR

SEQ ID NO: 2858 - protein, 6 aa, synthetic construct
RRFQRR

SEQ ID NO: 2859 - protein, 6 aa, synthetic construct
KLFSRK

SEQ ID NO: 2860 - protein, 6 aa, synthetic construct
RSQCRK

SEQ ID NO: 2861 - protein, 6 aa, synthetic construct
KSVCRR

SEQ ID NO: 2862 - protein, 6 aa, synthetic construct
KQICKR

SEQ ID NO: 2863 - protein, 6 aa, synthetic construct
KLLTRR

SEQ ID NO: 2864 - protein, 6 aa, synthetic construct
KSFRKK

SEQ ID NO: 2865 - protein, 6 aa, synthetic construct
KGVSKR

SEQ ID NO: 2866 - protein, 6 aa, synthetic construct
RLLTRR

SEQ ID NO: 2867 - protein, 6 aa, synthetic construct
KQYSRR

SEQ ID NO: 2868 - protein, 6 aa, synthetic construct
RSFSKR

SEQ ID NO: 2869 - protein, 6 aa, synthetic construct
RLRTKK

SEQ ID NO: 2870 - protein, 6 aa, synthetic construct
RLRRRK

SEQ ID NO: 2871 - protein, 6 aa, synthetic construct
KWISRR

SEQ ID NO: 2872 - protein, 6 aa, synthetic construct
RSRLRR

SEQ ID NO: 2873 - protein, 6 aa, synthetic construct
RGRLRK

SEQ ID NO: 2874 - protein, 6 aa, synthetic construct
RWQQRR

SEQ ID NO: 2875 - protein, 6 aa, synthetic construct
KRFCRR

SEQ ID NO: 2876 - protein, 6 aa, synthetic construct
KGIRKK

SEQ ID NO: 2877 - protein, 6 aa, synthetic construct
RSRTRR

SEQ ID NO: 2878 - protein, 6 aa, synthetic construct
KWYTRK

SEQ ID NO: 2879 - protein, 6 aa, synthetic construct
KWRLKK

SEQ ID NO: 2880 - protein, 6 aa, synthetic construct
RRFTKK

SEQ ID NO: 2881 - protein, 6 aa, synthetic construct
RQRYKK

SEQ ID NO: 2882 - protein, 6 aa, synthetic construct
KGQTRR

SEQ ID NO: 2883 - protein, 6 aa, synthetic construct
RRYLKK

SEQ ID NO: 2884 - protein, 6 aa, synthetic construct
RWYTKR

SEQ ID NO: 2885 - protein, 6 aa, synthetic construct
RQIQKR

SEQ ID NO: 2886 - protein, 6 aa, synthetic construct
KQQSKK

SEQ ID NO: 2887 - protein, 6 aa, synthetic construct
KSYTKR

SEQ ID NO: 2888 - protein, 6 aa, synthetic construct
KVYRRK

SEQ ID NO: 2889 - protein, 6 aa, synthetic construct
RVISKK

SEQ ID NO: 2890 - protein, 6 aa, synthetic construct
RRYQKK

SEQ ID NO: 2891 - protein, 6 aa, synthetic construct
KRICKR

SEQ ID NO: 2892 - protein, 6 aa, synthetic construct
RLIQKK

SEQ ID NO: 2893 - protein, 6 aa, synthetic construct
KGVRRK

SEQ ID NO: 2894 - protein, 6 aa, synthetic construct
KGLLRR

SEQ ID NO: 2895 - protein, 6 aa, synthetic construct
KLLCKK

SEQ ID NO: 2896 - protein, 6 aa, synthetic construct
RVRYRK

SEQ ID NO: 2897 - protein, 6 aa, synthetic construct
KSYTRR

SEQ ID NO: 2898 - protein, 6 aa, synthetic construct
KGLCRR

SEQ ID NO: 2899 - protein, 6 aa, synthetic construct
RLFTKR

SEQ ID NO: 2900 - protein, 6 aa, synthetic construct
KRICRR

SEQ ID NO: 2901 - protein, 6 aa, synthetic construct
KSYSKK

SEQ ID NO: 2902 - protein, 6 aa, synthetic construct
KSFCKR

SEQ ID NO: 2903 - protein, 6 aa, synthetic construct
KVQTKK

SEQ ID NO: 2904 - protein, 6 aa, synthetic construct
RGLTRK

SEQ ID NO: 2905 - protein, 6 aa, synthetic construct
KRQCKK

SEQ ID NO: 2906 - protein, 6 aa, synthetic construct
KSLLKK

SEQ ID NO: 2907 - protein, 6 aa, synthetic construct
RGICKR

SEQ ID NO: 2908 - protein, 6 aa, synthetic construct
RVFLKK

SEQ ID NO: 2909 - protein, 6 aa, synthetic construct
RGFYRK

SEQ ID NO: 2910 - protein, 6 aa, synthetic construct
KRVLKK

SEQ ID NO: 2911 - protein, 6 aa, synthetic construct
RVFCRR

SEQ ID NO: 2912 - protein, 6 aa, synthetic construct
RWFTRR

SEQ ID NO: 2913 - protein, 6 aa, synthetic construct
RRLTRK

SEQ ID NO: 2914 - protein, 6 aa, synthetic construct
KGLQKK

SEQ ID NO: 2915 - protein, 6 aa, synthetic construct
RWYCRK

SEQ ID NO: 2916 - protein, 6 aa, synthetic construct
RQQQKK

SEQ ID NO: 2917 - protein, 6 aa, synthetic construct
KLRTKK

SEQ ID NO: 2918 - protein, 6 aa, synthetic construct
KLVTKK

SEQ ID NO: 2919 - protein, 6 aa, synthetic construct
KQIQRR

SEQ ID NO: 2920 - protein, 6 aa, synthetic construct
KSYCKR

SEQ ID NO: 2921 - protein, 6 aa, synthetic construct
KQYTRK

SEQ ID NO: 2922 - protein, 6 aa, synthetic construct
RVVLRK

SEQ ID NO: 2923 - protein, 6 aa, synthetic construct
RGRYKR

SEQ ID NO: 2924 - protein, 6 aa, synthetic construct
RGIQKR

SEQ ID NO: 2925 - protein, 6 aa, synthetic construct
KWVRKK

SEQ ID NO: 2926 - protein, 6 aa, synthetic construct
RVLLRK

SEQ ID NO: 2927 - protein, 6 aa, synthetic construct
RGQTRR

SEQ ID NO: 2928 - protein, 6 aa, synthetic construct
KGFRKK

SEQ ID NO: 2929 - protein, 6 aa, synthetic construct
KQQRKR

SEQ ID NO: 2930 - protein, 6 aa, synthetic construct
RSYSKR

SEQ ID NO: 2931 - protein, 6 aa, synthetic construct
KVIYKR

SEQ ID NO: 2932 - protein, 6 aa, synthetic construct
KSITKR

SEQ ID NO: 2933 - protein, 6 aa, synthetic construct
KRLLKR

SEQ ID NO: 2934 - protein, 6 aa, synthetic construct
RVQLRR

SEQ ID NO: 2935 - protein, 6 aa, synthetic construct
KLFCRR

SEQ ID NO: 2936 - protein, 6 aa, synthetic construct
RWQRKK

SEQ ID NO: 2937 - protein, 6 aa, synthetic construct
KVLCKR

SEQ ID NO: 2938 - protein, 6 aa, synthetic construct
KQFCKK

SEQ ID NO: 2939 - protein, 6 aa, synthetic construct
KWYTKK

SEQ ID NO: 2940 - protein, 6 aa, synthetic construct
KRLTRR

SEQ ID NO: 2941 - protein, 6 aa, synthetic construct
KGQCRK

SEQ ID NO: 2942 - protein, 6 aa, synthetic construct
RQIYRR

SEQ ID NO: 2943 - protein, 6 aa, synthetic construct
RRQYRR

SEQ ID NO: 2944 - protein, 6 aa, synthetic construct
KVIQKR

SEQ ID NO: 2945 - protein, 6 aa, synthetic construct
KLYCRK

SEQ ID NO: 2946 - protein, 6 aa, synthetic construct
RVFTKK

SEQ ID NO: 2947 - protein, 6 aa, synthetic construct
RWQCKR

SEQ ID NO: 2948 - protein, 6 aa, synthetic construct
RLQCRR

SEQ ID NO: 2949 - protein, 6 aa, synthetic construct
KQLCKK

SEQ ID NO: 2950 - protein, 6 aa, synthetic construct
RSFTKK

SEQ ID NO: 2951 - protein, 6 aa, synthetic construct
KWYTKR

SEQ ID NO: 2952 - protein, 6 aa, synthetic construct
RGLLRR

SEQ ID NO: 2953 - protein, 6 aa, synthetic construct
RSLQKK

SEQ ID NO: 2954 - protein, 6 aa, synthetic construct
RWRCRR

SEQ ID NO: 2955 - protein, 6 aa, synthetic construct
RSVSKK

SEQ ID NO: 2956 - protein, 6 aa, synthetic construct
RSICKK

SEQ ID NO: 2957 - protein, 6 aa, synthetic construct
KWVLRK

SEQ ID NO: 2958 - protein, 6 aa, synthetic construct
KSVCKK

SEQ ID NO: 2959 - protein, 6 aa, synthetic construct
KGQLRR

SEQ ID NO: 2960 - protein, 6 aa, synthetic construct
RQYTRR

SEQ ID NO: 2961 - protein, 6 aa, synthetic construct
RRVLKK

SEQ ID NO: 2962 - protein, 6 aa, synthetic construct
RQQRKR

SEQ ID NO: 2963 - protein, 6 aa, synthetic construct
KGYQKR

SEQ ID NO: 2964 - protein, 6 aa, synthetic construct
KQVYRK

SEQ ID NO: 2965 - protein, 6 aa, synthetic construct
KSRRRR

SEQ ID NO: 2966 - protein, 6 aa, synthetic construct
KRLSKK

SEQ ID NO: 2967 - protein, 6 aa, synthetic construct
KLYYRK

SEQ ID NO: 2968 - protein, 6 aa, synthetic construct
KGFQKK

SEQ ID NO: 2969 - protein, 6 aa, synthetic construct
RWQLRK

SEQ ID NO: 2970 - protein, 6 aa, synthetic construct
RVYYKR

SEQ ID NO: 2971 - protein, 6 aa, synthetic construct
RGYQRR

SEQ ID NO: 2972 - protein, 6 aa, synthetic construct
KSQRRK

SEQ ID NO: 2973 - protein, 6 aa, synthetic construct
KLYLRR

SEQ ID NO: 2974 - protein, 6 aa, synthetic construct
KGVYRK

SEQ ID NO: 2975 - protein, 6 aa, synthetic construct
RGYSRK

SEQ ID NO: 2976 - protein, 6 aa, synthetic construct
KGVSRR

SEQ ID NO: 2977 - protein, 6 aa, synthetic construct
KRVQRR

SEQ ID NO: 2978 - protein, 6 aa, synthetic construct
RSVLRK

SEQ ID NO: 2979 - protein, 6 aa, synthetic construct
RWQYRK

SEQ ID NO: 2980 - protein, 6 aa, synthetic construct
KWQQRR

SEQ ID NO: 2981 - protein, 6 aa, synthetic construct
RVQQKR

SEQ ID NO: 2982 - protein, 6 aa, synthetic construct
RWQTRK

SEQ ID NO: 2983 - protein, 6 aa, synthetic construct
KSVTKK

SEQ ID NO: 2984 - protein, 6 aa, synthetic construct
KRLTRK

SEQ ID NO: 2985 - protein, 6 aa, synthetic construct
RSFRRK

SEQ ID NO: 2986 - protein, 6 aa, synthetic construct
RWLSRK

SEQ ID NO: 2987 - protein, 6 aa, synthetic construct
KRISKR

SEQ ID NO: 2988 - protein, 6 aa, synthetic construct
KWFYKK

SEQ ID NO: 2989 - protein, 6 aa, synthetic construct
RWQQRK

SEQ ID NO: 2990 - protein, 6 aa, synthetic construct
KGRLRK

SEQ ID NO: 2991 - protein, 6 aa, synthetic construct
KGILRR

SEQ ID NO: 2992 - protein, 6 aa, synthetic construct
RWVLRK

SEQ ID NO: 2993 - protein, 6 aa, synthetic construct
RSQLKR

SEQ ID NO: 2994 - protein, 6 aa, synthetic construct
RWYRRR

SEQ ID NO: 2995 - protein, 6 aa, synthetic construct
KLRCKK

SEQ ID NO: 2996 - protein, 6 aa, synthetic construct
KGIQKK

SEQ ID NO: 2997 - protein, 6 aa, synthetic construct
KQFLRK

SEQ ID NO: 2998 - protein, 6 aa, synthetic construct
KVFRRR

SEQ ID NO: 2999 - protein, 6 aa, synthetic construct
RRRYRK

SEQ ID NO: 3000 - protein, 6 aa, synthetic construct
RSQLKK

SEQ ID NO: 3001 - protein, 6 aa, synthetic construct
KNSHKK

SEQ ID NO: 3002 - protein, 6 aa, synthetic construct
RNTPKR

SEQ ID NO: 3003 - protein, 6 aa, synthetic construct
KFHARR

SEQ ID NO: 3004 - protein, 6 aa, synthetic construct
KEPIRK

SEQ ID NO: 3005 - protein, 6 aa, synthetic construct
KNCGKK

SEQ ID NO: 3006 - protein, 6 aa, synthetic construct
RKPFRR

SEQ ID NO: 3007 - protein, 6 aa, synthetic construct
KKWVKR

SEQ ID NO: 3008 - protein, 6 aa, synthetic construct
RCNHKK

SEQ ID NO: 3009 - protein, 6 aa, synthetic construct
RDSDRR

SEQ ID NO: 3010 - protein, 6 aa, synthetic construct
RKNPKR

SEQ ID NO: 3011 - protein, 6 aa, synthetic construct
RIKMRR

SEQ ID NO: 3012 - protein, 6 aa, synthetic construct
RDCVRK

SEQ ID NO: 3013 - protein, 6 aa, synthetic construct
KAANRR

SEQ ID NO: 3014 - protein, 6 aa, synthetic construct
KAWIRR

SEQ ID NO: 3015 - protein, 6 aa, synthetic construct
KDNGRK

SEQ ID NO: 3016 - protein, 6 aa, synthetic construct
REPHRK

SEQ ID NO: 3017 - protein, 6 aa, synthetic construct
RCNGRR

SEQ ID NO: 3018 - protein, 6 aa, synthetic construct
KHHKKR

SEQ ID NO: 3019 - protein, 6 aa, synthetic construct
RPPDRR

SEQ ID NO: 3020 - protein, 6 aa, synthetic construct
RHTGRR

SEQ ID NO: 3021 - protein, 6 aa, synthetic construct
RHEPKR

SEQ ID NO: 3022 - protein, 6 aa, synthetic construct
RYTNKR

SEQ ID NO: 3023 - protein, 6 aa, synthetic construct
KHAHRR

SEQ ID NO: 3024 - protein, 6 aa, synthetic construct
KPPIRK

SEQ ID NO: 3025 - protein, 6 aa, synthetic construct
RFPDKK

SEQ ID NO: 3026 - protein, 6 aa, synthetic construct
KNSEKK

SEQ ID NO: 3027 - protein, 6 aa, synthetic construct
KKTARR

SEQ ID NO: 3028 - protein, 6 aa, synthetic construct
RKSFKR

SEQ ID NO: 3029 - protein, 6 aa, synthetic construct
RFCWKK

SEQ ID NO: 3030 - protein, 6 aa, synthetic construct
RYAFRR

SEQ ID NO: 3031 - protein, 6 aa, synthetic construct
KYCMKR

SEQ ID NO: 3032 - protein, 6 aa, synthetic construct
KYDIKR

SEQ ID NO: 3033 - protein, 6 aa, synthetic construct
KYAVKR

SEQ ID NO: 3034 - protein, 6 aa, synthetic construct
RYEHRK

SEQ ID NO: 3035 - protein, 6 aa, synthetic construct
KECVRR

SEQ ID NO: 3036 - protein, 6 aa, synthetic construct
KMAPKR

SEQ ID NO: 3037 - protein, 6 aa, synthetic construct
RPPVRK

SEQ ID NO: 3038 - protein, 6 aa, synthetic construct
RCWAKR

SEQ ID NO: 3039 - protein, 6 aa, synthetic construct
KHTVKK

SEQ ID NO: 3040 - protein, 6 aa, synthetic construct
KFKKKR

SEQ ID NO: 3041 - protein, 6 aa, synthetic construct
REEFRR

SEQ ID NO: 3042 - protein, 6 aa, synthetic construct
KTENKK

SEQ ID NO: 3043 - protein, 6 aa, synthetic construct
KANPKK

SEQ ID NO: 3044 - protein, 6 aa, synthetic construct
REPNRR

SEQ ID NO: 3045 - protein, 6 aa, synthetic construct
RIKVKK

SEQ ID NO: 3046 - protein, 6 aa, synthetic construct
RAAPRR

SEQ ID NO: 3047 - protein, 6 aa, synthetic construct
KTEPKR

SEQ ID NO: 3048 - protein, 6 aa, synthetic construct
RYPDRK

SEQ ID NO: 3049 - protein, 6 aa, synthetic construct
KFDVRK

SEQ ID NO: 3050 - protein, 6 aa, synthetic construct
RFKARK

SEQ ID NO: 3051 - protein, 6 aa, synthetic construct
KNADRR

SEQ ID NO: 3052 - protein, 6 aa, synthetic construct
RTTMRK

SEQ ID NO: 3053 - protein, 6 aa, synthetic construct
KIEMKR

SEQ ID NO: 3054 - protein, 6 aa, synthetic construct
RMPEKR

SEQ ID NO: 3055 - protein, 6 aa, synthetic construct
KIWFRR

SEQ ID NO: 3056 - protein, 6 aa, synthetic construct
KADPRR

SEQ ID NO: 3057 - protein, 6 aa, synthetic construct
RKHERK

SEQ ID NO: 3058 - protein, 6 aa, synthetic construct
RYWVKK

SEQ ID NO: 3059 - protein, 6 aa, synthetic construct
KIPNKR

SEQ ID NO: 3060 - protein, 6 aa, synthetic construct
RHKDRK

SEQ ID NO: 3061 - protein, 6 aa, synthetic construct
RMKAKK

SEQ ID NO: 3062 - protein, 6 aa, synthetic construct
KAHPKK

SEQ ID NO: 3063 - protein, 6 aa, synthetic construct
KFAGRR

SEQ ID NO: 3064 - protein, 6 aa, synthetic construct
KCCWKK

SEQ ID NO: 3065 - protein, 6 aa, synthetic construct
KCAERR

SEQ ID NO: 3066 - protein, 6 aa, synthetic construct
KPMDRR

SEQ ID NO: 3067 - protein, 6 aa, synthetic construct
KHDMRR

SEQ ID NO: 3068 - protein, 6 aa, synthetic construct
RFCNKK

SEQ ID NO: 3069 - protein, 6 aa, synthetic construct
KNMWRK

SEQ ID NO: 3070 - protein, 6 aa, synthetic construct
RKWHKR

SEQ ID NO: 3071 - protein, 6 aa, synthetic construct
RDWIRR

SEQ ID NO: 3072 - protein, 6 aa, synthetic construct
KIDDRK

SEQ ID NO: 3073 - protein, 6 aa, synthetic construct
RFCGRK

SEQ ID NO: 3074 - protein, 6 aa, synthetic construct
KKWERK

SEQ ID NO: 3075 - protein, 6 aa, synthetic construct
RMKWRK

SEQ ID NO: 3076 - protein, 6 aa, synthetic construct
KCTAKK

SEQ ID NO: 3077 - protein, 6 aa, synthetic construct
RENWKK

SEQ ID NO: 3078 - protein, 6 aa, synthetic construct
KEWWRR

SEQ ID NO: 3079 - protein, 6 aa, synthetic construct
RYSAKK

SEQ ID NO: 3080 - protein, 6 aa, synthetic construct
KNHGKR

SEQ ID NO: 3081 - protein, 6 aa, synthetic construct
RDTWRR

SEQ ID NO: 3082 - protein, 6 aa, synthetic construct
RNMERR

SEQ ID NO: 3083 - protein, 6 aa, synthetic construct
KTEIRK

SEQ ID NO: 3084 - protein, 6 aa, synthetic construct
RYTMKK

SEQ ID NO: 3085 - protein, 6 aa, synthetic construct
KFHNRK

SEQ ID NO: 3086 - protein, 6 aa, synthetic construct
KTWEKK

SEQ ID NO: 3087 - protein, 6 aa, synthetic construct
KADGRK

SEQ ID NO: 3088 - protein, 6 aa, synthetic construct
RPMFRK

SEQ ID NO: 3089 - protein, 6 aa, synthetic construct
RDKERR

SEQ ID NO: 3090 - protein, 6 aa, synthetic construct
KFTMRK

SEQ ID NO: 3091 - protein, 6 aa, synthetic construct
RHKMRK

SEQ ID NO: 3092 - protein, 6 aa, synthetic construct
KYTNRR

SEQ ID NO: 3093 - protein, 6 aa, synthetic construct
KNTIRR

SEQ ID NO: 3094 - protein, 6 aa, synthetic construct
KDSIRK

SEQ ID NO: 3095 - protein, 6 aa, synthetic construct
KCWWRR

SEQ ID NO: 3096 - protein, 6 aa, synthetic construct
KFTKKK

SEQ ID NO: 3097 - protein, 6 aa, synthetic construct
KCAVKK

SEQ ID NO: 3098 - protein, 6 aa, synthetic construct
KCEDKK

SEQ ID NO: 3099 - protein, 6 aa, synthetic construct
KNAGKR

SEQ ID NO: 3100 - protein, 6 aa, synthetic construct
RPWHKK

SEQ ID NO: 3101 - protein, 6 aa, synthetic construct
KTWAKR

SEQ ID NO: 3102 - protein, 6 aa, synthetic construct
KEMIKR

SEQ ID NO: 3103 - protein, 6 aa, synthetic construct
RTMHKR

SEQ ID NO: 3104 - protein, 6 aa, synthetic construct
KDWHRK

SEQ ID NO: 3105 - protein, 6 aa, synthetic construct
RENFKK

SEQ ID NO: 3106 - protein, 6 aa, synthetic construct
KFTDRK

SEQ ID NO: 3107 - protein, 6 aa, synthetic construct
RTWKRK

SEQ ID NO: 3108 - protein, 6 aa, synthetic construct
RAWVKK

SEQ ID NO: 3109 - protein, 6 aa, synthetic construct
RIWPKR

SEQ ID NO: 3110 - protein, 6 aa, synthetic construct
RNKKKK

SEQ ID NO: 3111 - protein, 6 aa, synthetic construct
KECGRR

SEQ ID NO: 3112 - protein, 6 aa, synthetic construct
KIPHRR

SEQ ID NO: 3113 - protein, 6 aa, synthetic construct
RASWRR

SEQ ID NO: 3114 - protein, 6 aa, synthetic construct
KIDVRK

SEQ ID NO: 3115 - protein, 6 aa, synthetic construct
RATHRK

SEQ ID NO: 3116 - protein, 6 aa, synthetic construct
RTWKKR

SEQ ID NO: 3117 - protein, 6 aa, synthetic construct
KCPGKR

SEQ ID NO: 3118 - protein, 6 aa, synthetic construct
KYTFKR

SEQ ID NO: 3119 - protein, 6 aa, synthetic construct
KIKPRR

SEQ ID NO: 3120 - protein, 6 aa, synthetic construct
RATNRK

SEQ ID NO: 3121 - protein, 6 aa, synthetic construct
RHSKKK

SEQ ID NO: 3122 - protein, 6 aa, synthetic construct
RNEHRR

SEQ ID NO: 3123 - protein, 6 aa, synthetic construct
KEDMKR

SEQ ID NO: 3124 - protein, 6 aa, synthetic construct
KYTMKK

SEQ ID NO: 3125 - protein, 6 aa, synthetic construct
KAHMKK

SEQ ID NO: 3126 - protein, 6 aa, synthetic construct
KHHKKK

SEQ ID NO: 3127 - protein, 6 aa, synthetic construct
RDMIKR

SEQ ID NO: 3128 - protein, 6 aa, synthetic construct
RMTMKK

SEQ ID NO: 3129 - protein, 6 aa, synthetic construct
RCPDKR

SEQ ID NO: 3130 - protein, 6 aa, synthetic construct
RNTHKR

SEQ ID NO: 3131 - protein, 6 aa, synthetic construct
KASWKK

SEQ ID NO: 3132 - protein, 6 aa, synthetic construct
KPTWRK

SEQ ID NO: 3133 - protein, 6 aa, synthetic construct
RTPARK

SEQ ID NO: 3134 - protein, 6 aa, synthetic construct
KHCHRR

SEQ ID NO: 3135 - protein, 6 aa, synthetic construct
KMNAKK

SEQ ID NO: 3136 - protein, 6 aa, synthetic construct
KNNHKK

SEQ ID NO: 3137 - protein, 6 aa, synthetic construct
KDSVRR

SEQ ID NO: 3138 - protein, 6 aa, synthetic construct
KPWFKK

SEQ ID NO: 3139 - protein, 6 aa, synthetic construct
RIHAKK

SEQ ID NO: 3140 - protein, 6 aa, synthetic construct
KIDIRR

SEQ ID NO: 3141 - protein, 6 aa, synthetic construct
KNEKKR

SEQ ID NO: 3142 - protein, 6 aa, synthetic construct
KNNWRR

SEQ ID NO: 3143 - protein, 6 aa, synthetic construct
KHTMKR

SEQ ID NO: 3144 - protein, 6 aa, synthetic construct
KDHPRK

SEQ ID NO: 3145 - protein, 6 aa, synthetic construct
KNTERR

SEQ ID NO: 3146 - protein, 6 aa, synthetic construct
RIKVRK

SEQ ID NO: 3147 - protein, 6 aa, synthetic construct
RANFRR

SEQ ID NO: 3148 - protein, 6 aa, synthetic construct
RFDKKR

SEQ ID NO: 3149 - protein, 6 aa, synthetic construct
KMWKRK

SEQ ID NO: 3150 - protein, 6 aa, synthetic construct
RKCVKR

SEQ ID NO: 3151 - protein, 6 aa, synthetic construct
RPHWKR

SEQ ID NO: 3152 - protein, 6 aa, synthetic construct
KINWRR

SEQ ID NO: 3153 - protein, 6 aa, synthetic construct
RYEHRR

SEQ ID NO: 3154 - protein, 6 aa, synthetic construct
KADGRR

SEQ ID NO: 3155 - protein, 6 aa, synthetic construct
RYNDKK

SEQ ID NO: 3156 - protein, 6 aa, synthetic construct
KPTNRK

SEQ ID NO: 3157 - protein, 6 aa, synthetic construct
RIPNKR

SEQ ID NO: 3158 - protein, 6 aa, synthetic construct
RFSFKK

SEQ ID NO: 3159 - protein, 6 aa, synthetic construct
RFDEKK

SEQ ID NO: 3160 - protein, 6 aa, synthetic construct
KIPVKK

SEQ ID NO: 3161 - protein, 6 aa, synthetic construct
RTEPRK

SEQ ID NO: 3162 - protein, 6 aa, synthetic construct
KFEERK

SEQ ID NO: 3163 - protein, 6 aa, synthetic construct
KMKERR

SEQ ID NO: 3164 - protein, 6 aa, synthetic construct
RNAVKK

SEQ ID NO: 3165 - protein, 6 aa, synthetic construct
KHSPRK

SEQ ID NO: 3166 - protein, 6 aa, synthetic construct
RPTFRK

SEQ ID NO: 3167 - protein, 6 aa, synthetic construct
RICGRK

SEQ ID NO: 3168 - protein, 6 aa, synthetic construct
KYMGRK

SEQ ID NO: 3169 - protein, 6 aa, synthetic construct
RCPFRK

SEQ ID NO: 3170 - protein, 6 aa, synthetic construct
KPNMKK

SEQ ID NO: 3171 - protein, 6 aa, synthetic construct
KITARR

SEQ ID NO: 3172 - protein, 6 aa, synthetic construct
RHPAKK

SEQ ID NO: 3173 - protein, 6 aa, synthetic construct
KPDARR

SEQ ID NO: 3174 - protein, 6 aa, synthetic construct
KFDARK

SEQ ID NO: 3175 - protein, 6 aa, synthetic construct
KMSMKK

SEQ ID NO: 3176 - protein, 6 aa, synthetic construct
RFPWRK

SEQ ID NO: 3177 - protein, 6 aa, synthetic construct
KNDVRR

SEQ ID NO: 3178 - protein, 6 aa, synthetic construct
RNAPKK

SEQ ID NO: 3179 - protein, 6 aa, synthetic construct
KAAHRR

SEQ ID NO: 3180 - protein, 6 aa, synthetic construct
KITIRK

SEQ ID NO: 3181 - protein, 6 aa, synthetic construct
KTMNRK

SEQ ID NO: 3182 - protein, 6 aa, synthetic construct
KPWPKR

SEQ ID NO: 3183 - protein, 6 aa, synthetic construct
RDMVRK

SEQ ID NO: 3184 - protein, 6 aa, synthetic construct
KAEWRK

SEQ ID NO: 3185 - protein, 6 aa, synthetic construct
RHCHRR

SEQ ID NO: 3186 - protein, 6 aa, synthetic construct
RMEMRK

SEQ ID NO: 3187 - protein, 6 aa, synthetic construct
RIWHKK

SEQ ID NO: 3188 - protein, 6 aa, synthetic construct
KKEKKK

SEQ ID NO: 3189 - protein, 6 aa, synthetic construct
KNENRK

SEQ ID NO: 3190 - protein, 6 aa, synthetic construct
RCAGRR

SEQ ID NO: 3191 - protein, 6 aa, synthetic construct
KNMNRK

SEQ ID NO: 3192 - protein, 6 aa, synthetic construct
RAEDKR

SEQ ID NO: 3193 - protein, 6 aa, synthetic construct
RMHKKR

SEQ ID NO: 3194 - protein, 6 aa, synthetic construct
KAEMRR

SEQ ID NO: 3195 - protein, 6 aa, synthetic construct
RTHNKR

SEQ ID NO: 3196 - protein, 6 aa, synthetic construct
RMMARR

SEQ ID NO: 3197 - protein, 6 aa, synthetic construct
RHCIKR

SEQ ID NO: 3198 - protein, 6 aa, synthetic construct
RDTPKK

SEQ ID NO: 3199 - protein, 6 aa, synthetic construct
KCSAKK

SEQ ID NO: 3200 - protein, 6 aa, synthetic construct
RTAWKK

SEQ ID NO: 3201 - protein, 6 aa, synthetic construct
RPNIRK

SEQ ID NO: 3202 - protein, 6 aa, synthetic construct
KETKRR

SEQ ID NO: 3203 - protein, 6 aa, synthetic construct
RNKERK

SEQ ID NO: 3204 - protein, 6 aa, synthetic construct
RNCGKR

SEQ ID NO: 3205 - protein, 6 aa, synthetic construct
RDTMKK

SEQ ID NO: 3206 - protein, 6 aa, synthetic construct
KHCVRK

SEQ ID NO: 3207 - protein, 6 aa, synthetic construct
KIWNRK

SEQ ID NO: 3208 - protein, 6 aa, synthetic construct
RKKFKK

SEQ ID NO: 3209 - protein, 6 aa, synthetic construct
REPWRR

SEQ ID NO: 3210 - protein, 6 aa, synthetic construct
KHAKKK

SEQ ID NO: 3211 - protein, 6 aa, synthetic construct
KAMKRK

SEQ ID NO: 3212 - protein, 6 aa, synthetic construct
KPPEKR

SEQ ID NO: 3213 - protein, 6 aa, synthetic construct
KKMDRR

SEQ ID NO: 3214 - protein, 6 aa, synthetic construct
RYMERK

SEQ ID NO: 3215 - protein, 6 aa, synthetic construct
KICGRK

SEQ ID NO: 3216 - protein, 6 aa, synthetic construct
RKMGKR

SEQ ID NO: 3217 - protein, 6 aa, synthetic construct
KCNDKK

SEQ ID NO: 3218 - protein, 6 aa, synthetic construct
KTPERK

SEQ ID NO: 3219 - protein, 6 aa, synthetic construct
KFSVRR

SEQ ID NO: 3220 - protein, 6 aa, synthetic construct
RPNNKK

SEQ ID NO: 3221 - protein, 6 aa, synthetic construct
RPTMKR

SEQ ID NO: 3222 - protein, 6 aa, synthetic construct
RCTAKK

SEQ ID NO: 3223 - protein, 6 aa, synthetic construct
REDWRK

SEQ ID NO: 3224 - protein, 6 aa, synthetic construct
RITNKR

SEQ ID NO: 3225 - protein, 6 aa, synthetic construct
KIHARK

SEQ ID NO: 3226 - protein, 6 aa, synthetic construct
RNTPRK

SEQ ID NO: 3227 - protein, 6 aa, synthetic construct
KYAEKK

SEQ ID NO: 3228 - protein, 6 aa, synthetic construct
RMKKKR

SEQ ID NO: 3229 - protein, 6 aa, synthetic construct
KKKIRR

SEQ ID NO: 3230 - protein, 6 aa, synthetic construct
RMKFKR

SEQ ID NO: 3231 - protein, 6 aa, synthetic construct
RMTWRK

SEQ ID NO: 3232 - protein, 6 aa, synthetic construct
KYHNRR

SEQ ID NO: 3233 - protein, 6 aa, synthetic construct
RKTWRR

SEQ ID NO: 3234 - protein, 6 aa, synthetic construct
RFWWKR

SEQ ID NO: 3235 - protein, 6 aa, synthetic construct
RHCGKR

SEQ ID NO: 3236 - protein, 6 aa, synthetic construct
KNTMKR

SEQ ID NO: 3237 - protein, 6 aa, synthetic construct
REDFRR

SEQ ID NO: 3238 - protein, 6 aa, synthetic construct
RCTVRK

SEQ ID NO: 3239 - protein, 6 aa, synthetic construct
KNHNRR

SEQ ID NO: 3240 - protein, 6 aa, synthetic construct
KDWDRK

SEQ ID NO: 3241 - protein, 6 aa, synthetic construct
KPNHRK

SEQ ID NO: 3242 - protein, 6 aa, synthetic construct
KPKMRR

SEQ ID NO: 3243 - protein, 6 aa, synthetic construct
KAPDRK

SEQ ID NO: 3244 - protein, 6 aa, synthetic construct
RDPKKK

SEQ ID NO: 3245 - protein, 6 aa, synthetic construct
KMKEKR

SEQ ID NO: 3246 - protein, 6 aa, synthetic construct
RFSFKR

SEQ ID NO: 3247 - protein, 6 aa, synthetic construct
RYCHKR

SEQ ID NO: 3248 - protein, 6 aa, synthetic construct
RMTERK

SEQ ID NO: 3249 - protein, 6 aa, synthetic construct
RNTAKK

SEQ ID NO: 3250 - protein, 6 aa, synthetic construct
KTSMKR

SEQ ID NO: 3251 - protein, 6 aa, synthetic construct
KFWWRR

SEQ ID NO: 3252 - protein, 6 aa, synthetic construct
RNCERR

SEQ ID NO: 3253 - protein, 6 aa, synthetic construct
KHTGRR

SEQ ID NO: 3254 - protein, 6 aa, synthetic construct
RCNWKR

SEQ ID NO: 3255 - protein, 6 aa, synthetic construct
REMIKR

SEQ ID NO: 3256 - protein, 6 aa, synthetic construct
KEPMRR

SEQ ID NO: 3257 - protein, 6 aa, synthetic construct
KHTEKK

SEQ ID NO: 3258 - protein, 6 aa, synthetic construct
KEEHRR

SEQ ID NO: 3259 - protein, 6 aa, synthetic construct
RMDFRK

SEQ ID NO: 3260 - protein, 6 aa, synthetic construct
KPNFRR

SEQ ID NO: 3261 - protein, 6 aa, synthetic construct
KDTDRK

SEQ ID NO: 3262 - protein, 6 aa, synthetic construct
RHTFKK

SEQ ID NO: 3263 - protein, 6 aa, synthetic construct
RKHWRR

SEQ ID NO: 3264 - protein, 6 aa, synthetic construct
RKCAKK

SEQ ID NO: 3265 - protein, 6 aa, synthetic construct
RHCNRK

SEQ ID NO: 3266 - protein, 6 aa, synthetic construct
RDNPKK

SEQ ID NO: 3267 - protein, 6 aa, synthetic construct
KYWEKK

SEQ ID NO: 3268 - protein, 6 aa, synthetic construct
RTPNRR

SEQ ID NO: 3269 - protein, 6 aa, synthetic construct
RHDHKR

SEQ ID NO: 3270 - protein, 6 aa, synthetic construct
KMTEKK

SEQ ID NO: 3271 - protein, 6 aa, synthetic construct
REMPKR

SEQ ID NO: 3272 - protein, 6 aa, synthetic construct
KTHFRK

SEQ ID NO: 3273 - protein, 6 aa, synthetic construct
KNWGRR

SEQ ID NO: 3274 - protein, 6 aa, synthetic construct
KIHFRK

SEQ ID NO: 3275 - protein, 6 aa, synthetic construct
RIDHRK

SEQ ID NO: 3276 - protein, 6 aa, synthetic construct
KEDNKR

SEQ ID NO: 3277 - protein, 6 aa, synthetic construct
KPPERR

SEQ ID NO: 3278 - protein, 6 aa, synthetic construct
KETVRR

SEQ ID NO: 3279 - protein, 6 aa, synthetic construct
RTMDRR

SEQ ID NO: 3280 - protein, 6 aa, synthetic construct
RTHHKK

SEQ ID NO: 3281 - protein, 6 aa, synthetic construct
KDTEKK

SEQ ID NO: 3282 - protein, 6 aa, synthetic construct
RTPAKR

SEQ ID NO: 3283 - protein, 6 aa, synthetic construct
RTNEKR

SEQ ID NO: 3284 - protein, 6 aa, synthetic construct
KMTMKK

SEQ ID NO: 3285 - protein, 6 aa, synthetic construct
KCMVRR

SEQ ID NO: 3286 - protein, 6 aa, synthetic construct
KTWVRR

SEQ ID NO: 3287 - protein, 6 aa, synthetic construct
RCPKKR

SEQ ID NO: 3288 - protein, 6 aa, synthetic construct
RIAKRK

SEQ ID NO: 3289 - protein, 6 aa, synthetic construct
REWDKK

SEQ ID NO: 3290 - protein, 6 aa, synthetic construct
RDNPKR

SEQ ID NO: 3291 - protein, 6 aa, synthetic construct
RTSIRK

SEQ ID NO: 3292 - protein, 6 aa, synthetic construct
KDENRK

SEQ ID NO: 3293 - protein, 6 aa, synthetic construct
REHVRR

SEQ ID NO: 3294 - protein, 6 aa, synthetic construct
RFHWRR

SEQ ID NO: 3295 - protein, 6 aa, synthetic construct
KYMAKK

SEQ ID NO: 3296 - protein, 6 aa, synthetic construct
RTCARR

SEQ ID NO: 3297 - protein, 6 aa, synthetic construct
RPAHKK

SEQ ID NO: 3298 - protein, 6 aa, synthetic construct
KKKDKK

SEQ ID NO: 3299 - protein, 6 aa, synthetic construct
KKMVKR

SEQ ID NO: 3300 - protein, 6 aa, synthetic construct
RFSAKK

SEQ ID NO: 3301 - protein, 6 aa, synthetic construct
RYWDRK

SEQ ID NO: 3302 - protein, 6 aa, synthetic construct
KPDVRK

SEQ ID NO: 3303 - protein, 6 aa, synthetic construct
KKNPKK

SEQ ID NO: 3304 - protein, 6 aa, synthetic construct
KCCFKK

SEQ ID NO: 3305 - protein, 6 aa, synthetic construct
RPKERR

SEQ ID NO: 3306 - protein, 6 aa, synthetic construct
KYCDKK

SEQ ID NO: 3307 - protein, 6 aa, synthetic construct
RTMNRR

SEQ ID NO: 3308 - protein, 6 aa, synthetic construct
KYKKKR

SEQ ID NO: 3309 - protein, 6 aa, synthetic construct
RCNPRR

SEQ ID NO: 3310 - protein, 6 aa, synthetic construct
RHEHRR

SEQ ID NO: 3311 - protein, 6 aa, synthetic construct
KMSGKR

SEQ ID NO: 3312 - protein, 6 aa, synthetic construct
RAPIRR

SEQ ID NO: 3313 - protein, 6 aa, synthetic construct
KFKNRR

SEQ ID NO: 3314 - protein, 6 aa, synthetic construct
KDDIKK

SEQ ID NO: 3315 - protein, 6 aa, synthetic construct
KNCWKR

SEQ ID NO: 3316 - protein, 6 aa, synthetic construct
KTTEKR

SEQ ID NO: 3317 - protein, 6 aa, synthetic construct
RFCWRK

SEQ ID NO: 3318 - protein, 6 aa, synthetic construct
KNWMRK

SEQ ID NO: 3319 - protein, 6 aa, synthetic construct
KAKHKR

SEQ ID NO: 3320 - protein, 6 aa, synthetic construct
RMTIKK

SEQ ID NO: 3321 - protein, 6 aa, synthetic construct
RPKAKK

SEQ ID NO: 3322 - protein, 6 aa, synthetic construct
KDNVRR

SEQ ID NO: 3323 - protein, 6 aa, synthetic construct
RCCAKK

SEQ ID NO: 3324 - protein, 6 aa, synthetic construct
RFDHKK

SEQ ID NO: 3325 - protein, 6 aa, synthetic construct
RASVKR

SEQ ID NO: 3326 - protein, 6 aa, synthetic construct
RPTVKR

SEQ ID NO: 3327 - protein, 6 aa, synthetic construct
RFNPRK

SEQ ID NO: 3328 - protein, 6 aa, synthetic construct
KFCIRR

SEQ ID NO: 3329 - protein, 6 aa, synthetic construct
KNHMRK

SEQ ID NO: 3330 - protein, 6 aa, synthetic construct
RTWIKR

SEQ ID NO: 3331 - protein, 6 aa, synthetic construct
RYCFKR

SEQ ID NO: 3332 - protein, 6 aa, synthetic construct
RIPWRR

SEQ ID NO: 3333 - protein, 6 aa, synthetic construct
RYSMKR

SEQ ID NO: 3334 - protein, 6 aa, synthetic construct
KYKDRR

SEQ ID NO: 3335 - protein, 6 aa, synthetic construct
KKCNKK

SEQ ID NO: 3336 - protein, 6 aa, synthetic construct
KPPAKK

SEQ ID NO: 3337 - protein, 6 aa, synthetic construct
RASHRR

SEQ ID NO: 3338 - protein, 6 aa, synthetic construct
RIEHKR

SEQ ID NO: 3339 - protein, 6 aa, synthetic construct
KKCARR

SEQ ID NO: 3340 - protein, 6 aa, synthetic construct
RNENKK

SEQ ID NO: 3341 - protein, 6 aa, synthetic construct
RDEDKR

SEQ ID NO: 3342 - protein, 6 aa, synthetic construct
KTDKRK

SEQ ID NO: 3343 - protein, 6 aa, synthetic construct
KIDHRR

SEQ ID NO: 3344 - protein, 6 aa, synthetic construct
KPEDKK

SEQ ID NO: 3345 - protein, 6 aa, synthetic construct
KKCERK

SEQ ID NO: 3346 - protein, 6 aa, synthetic construct
KPCEKK

SEQ ID NO: 3347 - protein, 6 aa, synthetic construct
KTNWRK

SEQ ID NO: 3348 - protein, 6 aa, synthetic construct
RPPFRR

SEQ ID NO: 3349 - protein, 6 aa, synthetic construct
RPNARR

SEQ ID NO: 3350 - protein, 6 aa, synthetic construct
KYNKRR

SEQ ID NO: 3351 - protein, 6 aa, synthetic construct
RADEKK

SEQ ID NO: 3352 - protein, 6 aa, synthetic construct
KYWGRR

SEQ ID NO: 3353 - protein, 6 aa, synthetic construct
KESVKK

SEQ ID NO: 3354 - protein, 6 aa, synthetic construct
KCTIRK

SEQ ID NO: 3355 - protein, 6 aa, synthetic construct
RMPERR

SEQ ID NO: 3356 - protein, 6 aa, synthetic construct
KFCWRR

SEQ ID NO: 3357 - protein, 6 aa, synthetic construct
RDTHRR

SEQ ID NO: 3358 - protein, 6 aa, synthetic construct
KFKARK

SEQ ID NO: 3359 - protein, 6 aa, synthetic construct
RTNARK

SEQ ID NO: 3360 - protein, 6 aa, synthetic construct
RDCVKR

SEQ ID NO: 3361 - protein, 6 aa, synthetic construct
KNTKKR

SEQ ID NO: 3362 - protein, 6 aa, synthetic construct
KKSNRK

SEQ ID NO: 3363 - protein, 6 aa, synthetic construct
KAKHRR

SEQ ID NO: 3364 - protein, 6 aa, synthetic construct
KCEDRK

SEQ ID NO: 3365 - protein, 6 aa, synthetic construct
KPWFKR

SEQ ID NO: 3366 - protein, 6 aa, synthetic construct
KEDAKR

SEQ ID NO: 3367 - protein, 6 aa, synthetic construct
RTSNKK

SEQ ID NO: 3368 - protein, 6 aa, synthetic construct
RHWEKK

SEQ ID NO: 3369 - protein, 6 aa, synthetic construct
KATHKR

SEQ ID NO: 3370 - protein, 6 aa, synthetic construct
KDDVRR

SEQ ID NO: 3371 - protein, 6 aa, synthetic construct
KEMFRK

SEQ ID NO: 3372 - protein, 6 aa, synthetic construct
KAMFRR

SEQ ID NO: 3373 - protein, 6 aa, synthetic construct
KCPIKK

SEQ ID NO: 3374 - protein, 6 aa, synthetic construct
RFDDRR

SEQ ID NO: 3375 - protein, 6 aa, synthetic construct
KKTMKK

SEQ ID NO: 3376 - protein, 6 aa, synthetic construct
RTTGKK

SEQ ID NO: 3377 - protein, 6 aa, synthetic construct
REMKRK

SEQ ID NO: 3378 - protein, 6 aa, synthetic construct
KEPHRR

SEQ ID NO: 3379 - protein, 6 aa, synthetic construct
KKAFKK

SEQ ID NO: 3380 - protein, 6 aa, synthetic construct
KESGKR

SEQ ID NO: 3381 - protein, 6 aa, synthetic construct
RCEIRK

SEQ ID NO: 3382 - protein, 6 aa, synthetic construct
RMHAKK

SEQ ID NO: 3383 - protein, 6 aa, synthetic construct
RTWHRR

SEQ ID NO: 3384 - protein, 6 aa, synthetic construct
KDMWKK

SEQ ID NO: 3385 - protein, 6 aa, synthetic construct
REMNKR

SEQ ID NO: 3386 - protein, 6 aa, synthetic construct
KNWARR

SEQ ID NO: 3387 - protein, 6 aa, synthetic construct
RCHPKK

SEQ ID NO: 3388 - protein, 6 aa, synthetic construct
KMCEKK

SEQ ID NO: 3389 - protein, 6 aa, synthetic construct
KAHNKR

SEQ ID NO: 3390 - protein, 6 aa, synthetic construct
RKKMKR

SEQ ID NO: 3391 - protein, 6 aa, synthetic construct
KCHFRR

SEQ ID NO: 3392 - protein, 6 aa, synthetic construct
RMHFRR

SEQ ID NO: 3393 - protein, 6 aa, synthetic construct
RHDVKK

SEQ ID NO: 3394 - protein, 6 aa, synthetic construct
KYCIKK

SEQ ID NO: 3395 - protein, 6 aa, synthetic construct
KFWEKK

SEQ ID NO: 3396 - protein, 6 aa, synthetic construct
RHDARK

SEQ ID NO: 3397 - protein, 6 aa, synthetic construct
KISFKK

SEQ ID NO: 3398 - protein, 6 aa, synthetic construct
KEMWKK

SEQ ID NO: 3399 - protein, 6 aa, synthetic construct
RATIKR

SEQ ID NO: 3400 - protein, 6 aa, synthetic construct
KCHDKK

SEQ ID NO: 3401 - protein, 6 aa, synthetic construct
RKKFKK

SEQ ID NO: 3402 - protein, 6 aa, synthetic construct
RCNDKR

SEQ ID NO: 3403 - protein, 6 aa, synthetic construct
KPEWKR

SEQ ID NO: 3404 - protein, 6 aa, synthetic construct
RDTHKR

SEQ ID NO: 3405 - protein, 6 aa, synthetic construct
RFKARR

SEQ ID NO: 3406 - protein, 6 aa, synthetic construct
RATMRR

SEQ ID NO: 3407 - protein, 6 aa, synthetic construct
RHTNKK

SEQ ID NO: 3408 - protein, 6 aa, synthetic construct
RAWKKR

SEQ ID NO: 3409 - protein, 6 aa, synthetic construct
KINPRK

SEQ ID NO: 3410 - protein, 6 aa, synthetic construct
RANHKK

SEQ ID NO: 3411 - protein, 6 aa, synthetic construct
RAEFRR

SEQ ID NO: 3412 - protein, 6 aa, synthetic construct
KASAKK

SEQ ID NO: 3413 - protein, 6 aa, synthetic construct
KPPDKR

SEQ ID NO: 3414 - protein, 6 aa, synthetic construct
RPPMRR

SEQ ID NO: 3415 - protein, 6 aa, synthetic construct
RDEMKR

SEQ ID NO: 3416 - protein, 6 aa, synthetic construct
RNEEKR

SEQ ID NO: 3417 - protein, 6 aa, synthetic construct
RAPVRR

SEQ ID NO: 3418 - protein, 6 aa, synthetic construct
RPTKKK

SEQ ID NO: 3419 - protein, 6 aa, synthetic construct
RNTWKK

SEQ ID NO: 3420 - protein, 6 aa, synthetic construct
KHDKKR

SEQ ID NO: 3421 - protein, 6 aa, synthetic construct
RYTPKR

SEQ ID NO: 3422 - protein, 6 aa, synthetic construct
KCNPRR

SEQ ID NO: 3423 - protein, 6 aa, synthetic construct
KAEFKR

SEQ ID NO: 3424 - protein, 6 aa, synthetic construct
RFHNKR

SEQ ID NO: 3425 - protein, 6 aa, synthetic construct
RCSHRR

SEQ ID NO: 3426 - protein, 6 aa, synthetic construct
KENHRK

SEQ ID NO: 3427 - protein, 6 aa, synthetic construct
KTPVKK

SEQ ID NO: 3428 - protein, 6 aa, synthetic construct
KPEHRR

SEQ ID NO: 3429 - protein, 6 aa, synthetic construct
KEEFKK

SEQ ID NO: 3430 - protein, 6 aa, synthetic construct
RAPFKK

SEQ ID NO: 3431 - protein, 6 aa, synthetic construct
RAWERK

SEQ ID NO: 3432 - protein, 6 aa, synthetic construct
KETVKR

SEQ ID NO: 3433 - protein, 6 aa, synthetic construct
KMDEKK

SEQ ID NO: 3434 - protein, 6 aa, synthetic construct
KHSWRR

SEQ ID NO: 3435 - protein, 6 aa, synthetic construct
RPPVKK

SEQ ID NO: 3436 - protein, 6 aa, synthetic construct
KAKNKR

SEQ ID NO: 3437 - protein, 6 aa, synthetic construct
KIHWKK

SEQ ID NO: 3438 - protein, 6 aa, synthetic construct
KHWERK

SEQ ID NO: 3439 - protein, 6 aa, synthetic construct
RNHFRK

SEQ ID NO: 3440 - protein, 6 aa, synthetic construct
KYAWRK

SEQ ID NO: 3441 - protein, 6 aa, synthetic construct
RACDKR

SEQ ID NO: 3442 - protein, 6 aa, synthetic construct
KKMFRK

SEQ ID NO: 3443 - protein, 6 aa, synthetic construct
RDKGKK

SEQ ID NO: 3444 - protein, 6 aa, synthetic construct
KHTDKK

SEQ ID NO: 3445 - protein, 6 aa, synthetic construct
RHAHRR

SEQ ID NO: 3446 - protein, 6 aa, synthetic construct
RNSEKR

SEQ ID NO: 3447 - protein, 6 aa, synthetic construct
RHDDKR

SEQ ID NO: 3448 - protein, 6 aa, synthetic construct
RIHNRK

SEQ ID NO: 3449 - protein, 6 aa, synthetic construct
KMSPRR

SEQ ID NO: 3450 - protein, 6 aa, synthetic construct
KPPPRK

SEQ ID NO: 3451 - protein, 6 aa, synthetic construct
RKHMRR

SEQ ID NO: 3452 - protein, 6 aa, synthetic construct
KAPARK

SEQ ID NO: 3453 - protein, 6 aa, synthetic construct
KEMGKK

SEQ ID NO: 3454 - protein, 6 aa, synthetic construct
KKNKKR

SEQ ID NO: 3455 - protein, 6 aa, synthetic construct
KPDFKR

SEQ ID NO: 3456 - protein, 6 aa, synthetic construct
RNDERK

SEQ ID NO: 3457 - protein, 6 aa, synthetic construct
RKKKKK

SEQ ID NO: 3458 - protein, 6 aa, synthetic construct
RMPWKK

SEQ ID NO: 3459 - protein, 6 aa, synthetic construct
RFADRR

SEQ ID NO: 3460 - protein, 6 aa, synthetic construct
KTNERK

SEQ ID NO: 3461 - protein, 6 aa, synthetic construct
KPPIKK

SEQ ID NO: 3462 - protein, 6 aa, synthetic construct
KYNIRK

SEQ ID NO: 3463 - protein, 6 aa, synthetic construct
RFNVRK

SEQ ID NO: 3464 - protein, 6 aa, synthetic construct
RCMKRR

SEQ ID NO: 3465 - protein, 6 aa, synthetic construct
RIANRK

SEQ ID NO: 3466 - protein, 6 aa, synthetic construct
KPEHKR

SEQ ID NO: 3467 - protein, 6 aa, synthetic construct
RDEIRK

SEQ ID NO: 3468 - protein, 6 aa, synthetic construct
RIHVKK

SEQ ID NO: 3469 - protein, 6 aa, synthetic construct
KHDMKK

SEQ ID NO: 3470 - protein, 6 aa, synthetic construct
RPHVRR

SEQ ID NO: 3471 - protein, 6 aa, synthetic construct
RTTWRK

SEQ ID NO: 3472 - protein, 6 aa, synthetic construct
KPHWKR

SEQ ID NO: 3473 - protein, 6 aa, synthetic construct
KYSWRK

SEQ ID NO: 3474 - protein, 6 aa, synthetic construct
RPMGRK

SEQ ID NO: 3475 - protein, 6 aa, synthetic construct
RHMERK

SEQ ID NO: 3476 - protein, 6 aa, synthetic construct
RYCIRR

SEQ ID NO: 3477 - protein, 6 aa, synthetic construct
KMTIKK

SEQ ID NO: 3478 - protein, 6 aa, synthetic construct
KDTFRR

SEQ ID NO: 3479 - protein, 6 aa, synthetic construct
KCNEKK

SEQ ID NO: 3480 - protein, 6 aa, synthetic construct
RKHKKK

SEQ ID NO: 3481 - protein, 6 aa, synthetic construct
KYKMRR

SEQ ID NO: 3482 - protein, 6 aa, synthetic construct
KYTERR

SEQ ID NO: 3483 - protein, 6 aa, synthetic construct
KTKGKR

SEQ ID NO: 3484 - protein, 6 aa, synthetic construct
REKPRK

SEQ ID NO: 3485 - protein, 6 aa, synthetic construct
RPEIRK

SEQ ID NO: 3486 - protein, 6 aa, synthetic construct
KNDWRK

SEQ ID NO: 3487 - protein, 6 aa, synthetic construct
KEEMRR

SEQ ID NO: 3488 - protein, 6 aa, synthetic construct
RPCEKK

SEQ ID NO: 3489 - protein, 6 aa, synthetic construct
RKTDRR

SEQ ID NO: 3490 - protein, 6 aa, synthetic construct
KEMHKK

SEQ ID NO: 3491 - protein, 6 aa, synthetic construct
RFDNKR

SEQ ID NO: 3492 - protein, 6 aa, synthetic construct
RAKFRR

SEQ ID NO: 3493 - protein, 6 aa, synthetic construct
KTTDKK

SEQ ID NO: 3494 - protein, 6 aa, synthetic construct
KAWERK

SEQ ID NO: 3495 - protein, 6 aa, synthetic construct
KYSMRR

SEQ ID NO: 3496 - protein, 6 aa, synthetic construct
RANVKR

SEQ ID NO: 3497 - protein, 6 aa, synthetic construct
RFWEKK

SEQ ID NO: 3498 - protein, 6 aa, synthetic construct
KHPKRR

SEQ ID NO: 3499 - protein, 6 aa, synthetic construct
REDWRR

SEQ ID NO: 3500 - protein, 6 aa, synthetic construct
RTAPKK

SEQ ID NO: 3501 - protein, 6 aa, synthetic construct
RTKMRR

SEQ ID NO: 3502 - protein, 6 aa, synthetic construct
KHKGKR

SEQ ID NO: 3503 - protein, 6 aa, synthetic construct
RDAWRK

SEQ ID NO: 3504 - protein, 6 aa, synthetic construct
RYTKKR

SEQ ID NO: 3505 - protein, 6 aa, synthetic construct
RNNAKK

SEQ ID NO: 3506 - protein, 6 aa, synthetic construct
KDKVKR

SEQ ID NO: 3507 - protein, 6 aa, synthetic construct
RAHERK

SEQ ID NO: 3508 - protein, 6 aa, synthetic construct
KKKVRR

SEQ ID NO: 3509 - protein, 6 aa, synthetic construct
KEDMRK

SEQ ID NO: 3510 - protein, 6 aa, synthetic construct
RMTKKK

SEQ ID NO: 3511 - protein, 6 aa, synthetic construct
REDEKK

SEQ ID NO: 3512 - protein, 6 aa, synthetic construct
RASWRK

SEQ ID NO: 3513 - protein, 6 aa, synthetic construct
KPNFRK

SEQ ID NO: 3514 - protein, 6 aa, synthetic construct
RKKFRK

SEQ ID NO: 3515 - protein, 6 aa, synthetic construct
KYSPRK

SEQ ID NO: 3516 - protein, 6 aa, synthetic construct
KMEVKK

SEQ ID NO: 3517 - protein, 6 aa, synthetic construct
RMHVKR

SEQ ID NO: 3518 - protein, 6 aa, synthetic construct
RFDGRR

SEQ ID NO: 3519 - protein, 6 aa, synthetic construct
KCTVRK

SEQ ID NO: 3520 - protein, 6 aa, synthetic construct
RDMMKK

SEQ ID NO: 3521 - protein, 6 aa, synthetic construct
KPSKRR

SEQ ID NO: 3522 - protein, 6 aa, synthetic construct
RCNFKK

SEQ ID NO: 3523 - protein, 6 aa, synthetic construct
RITARR

SEQ ID NO: 3524 - protein, 6 aa, synthetic construct
RKTWRK

SEQ ID NO: 3525 - protein, 6 aa, synthetic construct
RDAFKK

SEQ ID NO: 3526 - protein, 6 aa, synthetic construct
RHEVRR

SEQ ID NO: 3527 - protein, 6 aa, synthetic construct
KAAEKK

SEQ ID NO: 3528 - protein, 6 aa, synthetic construct
KNCMRK

SEQ ID NO: 3529 - protein, 6 aa, synthetic construct
RITGKR

SEQ ID NO: 3530 - protein, 6 aa, synthetic construct
RHSFRK

SEQ ID NO: 3531 - protein, 6 aa, synthetic construct
RTNAKR

SEQ ID NO: 3532 - protein, 6 aa, synthetic construct
RPWERR

SEQ ID NO: 3533 - protein, 6 aa, synthetic construct
KMKMKK

SEQ ID NO: 3534 - protein, 6 aa, synthetic construct
KYENRK

SEQ ID NO: 3535 - protein, 6 aa, synthetic construct
RANWKR

SEQ ID NO: 3536 - protein, 6 aa, synthetic construct
KMKKKR

SEQ ID NO: 3537 - protein, 6 aa, synthetic construct
RTDFKR

SEQ ID NO: 3538 - protein, 6 aa, synthetic construct
KAHFKK

SEQ ID NO: 3539 - protein, 6 aa, synthetic construct
KAKAKK

SEQ ID NO: 3540 - protein, 6 aa, synthetic construct
KMNKKR

SEQ ID NO: 3541 - protein, 6 aa, synthetic construct
KCTGKR

SEQ ID NO: 3542 - protein, 6 aa, synthetic construct
KKAMKR

SEQ ID NO: 3543 - protein, 6 aa, synthetic construct
KACIKK

SEQ ID NO: 3544 - protein, 6 aa, synthetic construct
RFEDRK

SEQ ID NO: 3545 - protein, 6 aa, synthetic construct
RIKNRR

SEQ ID NO: 3546 - protein, 6 aa, synthetic construct
REWGRK

SEQ ID NO: 3547 - protein, 6 aa, synthetic construct
KFMKKK

SEQ ID NO: 3548 - protein, 6 aa, synthetic construct
KEKGKR

SEQ ID NO: 3549 - protein, 6 aa, synthetic construct
KIDFRR

SEQ ID NO: 3550 - protein, 6 aa, synthetic construct
KTDVKK

SEQ ID NO: 3551 - protein, 6 aa, synthetic construct
RYPVRK

SEQ ID NO: 3552 - protein, 6 aa, synthetic construct
RNWAKK

SEQ ID NO: 3553 - protein, 6 aa, synthetic construct
KHKPKR

SEQ ID NO: 3554 - protein, 6 aa, synthetic construct
RYEARR

SEQ ID NO: 3555 - protein, 6 aa, synthetic construct
RNTNRK

SEQ ID NO: 3556 - protein, 6 aa, synthetic construct
KMNARR

SEQ ID NO: 3557 - protein, 6 aa, synthetic construct
RNTDRK

SEQ ID NO: 3558 - protein, 6 aa, synthetic construct
RDNIRK

SEQ ID NO: 3559 - protein, 6 aa, synthetic construct
KDMGKR

SEQ ID NO: 3560 - protein, 6 aa, synthetic construct
RITVKK

SEQ ID NO: 3561 - protein, 6 aa, synthetic construct
RHSFKK

SEQ ID NO: 3562 - protein, 6 aa, synthetic construct
KMSERR

SEQ ID NO: 3563 - protein, 6 aa, synthetic construct
KCHFKK

SEQ ID NO: 3564 - protein, 6 aa, synthetic construct
RYNHKR

SEQ ID NO: 3565 - protein, 6 aa, synthetic construct
RIKAKK

SEQ ID NO: 3566 - protein, 6 aa, synthetic construct
KCSIKK

SEQ ID NO: 3567 - protein, 6 aa, synthetic construct
RCAPKR

SEQ ID NO: 3568 - protein, 6 aa, synthetic construct
KMKPKK

SEQ ID NO: 3569 - protein, 6 aa, synthetic construct
KICERK

SEQ ID NO: 3570 - protein, 6 aa, synthetic construct
KFTIRR

SEQ ID NO: 3571 - protein, 6 aa, synthetic construct
KMPARR

SEQ ID NO: 3572 - protein, 6 aa, synthetic construct
KNCERR

SEQ ID NO: 3573 - protein, 6 aa, synthetic construct
KCCNKK

SEQ ID NO: 3574 - protein, 6 aa, synthetic construct
RCEPRK

SEQ ID NO: 3575 - protein, 6 aa, synthetic construct
RYSKRR

SEQ ID NO: 3576 - protein, 6 aa, synthetic construct
RYTEKK

SEQ ID NO: 3577 - protein, 6 aa, synthetic construct
RASEKR

SEQ ID NO: 3578 - protein, 6 aa, synthetic construct
KTTVRK

SEQ ID NO: 3579 - protein, 6 aa, synthetic construct
KACVKK

SEQ ID NO: 3580 - protein, 6 aa, synthetic construct
RAANRR

SEQ ID NO: 3581 - protein, 6 aa, synthetic construct
KACWKR

SEQ ID NO: 3582 - protein, 6 aa, synthetic construct
RHNDKR

SEQ ID NO: 3583 - protein, 6 aa, synthetic construct
RENNRK

SEQ ID NO: 3584 - protein, 6 aa, synthetic construct
KFWVRR

SEQ ID NO: 3585 - protein, 6 aa, synthetic construct
RIDAKK

SEQ ID NO: 3586 - protein, 6 aa, synthetic construct
KEKFRR

SEQ ID NO: 3587 - protein, 6 aa, synthetic construct
RTADRK

SEQ ID NO: 3588 - protein, 6 aa, synthetic construct
RAPARR

SEQ ID NO: 3589 - protein, 6 aa, synthetic construct
KTAPKK

SEQ ID NO: 3590 - protein, 6 aa, synthetic construct
KACIRR

SEQ ID NO: 3591 - protein, 6 aa, synthetic construct
KKADRK

SEQ ID NO: 3592 - protein, 6 aa, synthetic construct
KHKNKR

SEQ ID NO: 3593 - protein, 6 aa, synthetic construct
REKIRR

SEQ ID NO: 3594 - protein, 6 aa, synthetic construct
KYCDRK

SEQ ID NO: 3595 - protein, 6 aa, synthetic construct
KMTERK

SEQ ID NO: 3596 - protein, 6 aa, synthetic construct
RESKKR

SEQ ID NO: 3597 - protein, 6 aa, synthetic construct
KNCIKK

SEQ ID NO: 3598 - protein, 6 aa, synthetic construct
RMSHRR

SEQ ID NO: 3599 - protein, 6 aa, synthetic construct
RCTNKR

SEQ ID NO: 3600 - protein, 6 aa, synthetic construct
RHHNRR

SEQ ID NO: 3601 - protein, 6 aa, synthetic construct
GRRQRR

SEQ ID NO: 3602 - protein, 6 aa, synthetic construct
ARRQRR

SEQ ID NO: 3603 - protein, 6 aa, synthetic construct
VRRQRR

SEQ ID NO: 3604 - protein, 6 aa, synthetic construct
CRRQRR

SEQ ID NO: 3605 - protein, 6 aa, synthetic construct
PRRQRR

SEQ ID NO: 3606 - protein, 6 aa, synthetic construct
LRRQRR

SEQ ID NO: 3607 - protein, 6 aa, synthetic construct
IRRQRR

SEQ ID NO: 3608 - protein, 6 aa, synthetic construct
MRRQRR

SEQ ID NO: 3609 - protein, 6 aa, synthetic construct
WRRQRR

SEQ ID NO: 3610 - protein, 6 aa, synthetic construct
FRRQRR

SEQ ID NO: 3611 - protein, 6 aa, synthetic construct
SRRQRR

SEQ ID NO: 3612 - protein, 6 aa, synthetic construct
TRRQRR

SEQ ID NO: 3613 - protein, 6 aa, synthetic construct
YRRQRR

SEQ ID NO: 3614 - protein, 6 aa, synthetic construct
NRRQRR

SEQ ID NO: 3615 - protein, 6 aa, synthetic construct
QRRQRR

SEQ ID NO: 3616 - protein, 6 aa, synthetic construct
KRRQRR

SEQ ID NO: 3617 - protein, 6 aa, synthetic construct
RRRQRR

SEQ ID NO: 3618 - protein, 6 aa, synthetic construct
HRRQRR

SEQ ID NO: 3619 - protein, 6 aa, synthetic construct
DRRQRR

SEQ ID NO: 3620 - protein, 6 aa, synthetic construct
ERRQRR

SEQ ID NO: 3621 - protein, 6 aa, synthetic construct
RRQRRG

SEQ ID NO: 3622 - protein, 6 aa, synthetic construct
RRQRRA

SEQ ID NO: 3623 - protein, 6 aa, synthetic construct
RRQRRV

SEQ ID NO: 3624 - protein, 6 aa, synthetic construct
RRQRRC

SEQ ID NO: 3625 - protein, 6 aa, synthetic construct
RRQRRP

SEQ ID NO: 3626 - protein, 6 aa, synthetic construct
RRQRRL

SEQ ID NO: 3627 - protein, 6 aa, synthetic construct
RRQRRI

SEQ ID NO: 3628 - protein, 6 aa, synthetic construct
RRQRRM

SEQ ID NO: 3629 - protein, 6 aa, synthetic construct
RRQRRW

SEQ ID NO: 3630 - protein, 6 aa, synthetic construct
RRQRRF

SEQ ID NO: 3631 - protein, 6 aa, synthetic construct
RRQRRS

SEQ ID NO: 3632 - protein, 6 aa, synthetic construct
RRQRRT

SEQ ID NO: 3633 - protein, 6 aa, synthetic construct
RRQRRY

SEQ ID NO: 3634 - protein, 6 aa, synthetic construct
RRQRRN

SEQ ID NO: 3635 - protein, 6 aa, synthetic construct
RRQRRQ

SEQ ID NO: 3636 - protein, 6 aa, synthetic construct
RRQRRK

SEQ ID NO: 3637 - protein, 6 aa, synthetic construct
RRQRRR

SEQ ID NO: 3638 - protein, 6 aa, synthetic construct
RRQRRH

SEQ ID NO: 3639 - protein, 6 aa, synthetic construct
RRQRRD

SEQ ID NO: 3640 - protein, 6 aa, synthetic construct
RRQRRE

SEQ ID NO: 3641 - protein, 7 aa, synthetic construct
GRRGVRR

SEQ ID NO: 3642 - protein, 7 aa, synthetic construct
ARRGVRR

SEQ ID NO: 3643 - protein, 7 aa, synthetic construct
VRRGVRR

SEQ ID NO: 3644 - protein, 7 aa, synthetic construct
CRRGVRR

SEQ ID NO: 3645 - protein, 7 aa, synthetic construct
PRRGVRR

SEQ ID NO: 3646 - protein, 7 aa, synthetic construct
LRRGVRR

SEQ ID NO: 3647 - protein, 7 aa, synthetic construct
IRRGVRR

SEQ ID NO: 3648 - protein, 7 aa, synthetic construct
MRRGVRR

SEQ ID NO: 3649 - protein, 7 aa, synthetic construct
WRRGVRR

SEQ ID NO: 3650 - protein, 7 aa, synthetic construct
FRRGVRR

SEQ ID NO: 3651 - protein, 7 aa, synthetic construct
SRRGVRR

SEQ ID NO: 3652 - protein, 7 aa, synthetic construct
TRRGVRR

SEQ ID NO: 3653 - protein, 7 aa, synthetic construct
YRRGVRR

SEQ ID NO: 3654 - protein, 7 aa, synthetic construct
NRRGVRR

SEQ ID NO: 3655 - protein, 7 aa, synthetic construct
QRRGVRR

SEQ ID NO: 3656 - protein, 7 aa, synthetic construct
KRRGVRR

SEQ ID NO: 3657 - protein, 7 aa, synthetic construct
RRRGVRR

SEQ ID NO: 3658 - protein, 7 aa, synthetic construct
HRRGVRR

SEQ ID NO: 3659 - protein, 7 aa, synthetic construct
DRRGVRR

SEQ ID NO: 3660 - protein, 7 aa, synthetic construct
ERRGVRR

SEQ ID NO: 3661 - protein, 7 aa, synthetic construct
RRGVRRG

SEQ ID NO: 3662 - protein, 7 aa, synthetic construct
RRGVRRA

SEQ ID NO: 3663 - protein, 7 aa, synthetic construct
RRGVRRV

SEQ ID NO: 3664 - protein, 7 aa, synthetic construct
RRGVRRC

SEQ ID NO: 3665 - protein, 7 aa, synthetic construct
RRGVRRP

SEQ ID NO: 3666 - protein, 7 aa, synthetic construct
RRGVRRL

SEQ ID NO: 3667 - protein, 7 aa, synthetic construct
RRGVRRI

SEQ ID NO: 3668 - protein, 7 aa, synthetic construct
RRGVRRM

SEQ ID NO: 3669 - protein, 7 aa, synthetic construct
RRGVRRW

SEQ ID NO: 3670 - protein, 7 aa, synthetic construct
RRGVRRF

SEQ ID NO: 3671 - protein, 7 aa, synthetic construct
RRGVRRS

SEQ ID NO: 3672 - protein, 7 aa, synthetic construct
RRGVRRT

SEQ ID NO: 3673 - protein, 7 aa, synthetic construct
RRGVRRY

SEQ ID NO: 3674 - protein, 7 aa, synthetic construct
RRGVRRN

SEQ ID NO: 3675 - protein, 7 aa, synthetic construct
RRGVRRQ

SEQ ID NO: 3676 - protein, 7 aa, synthetic construct
RRGVRRK

SEQ ID NO: 3677 - protein, 7 aa, synthetic construct
RRGVRRR

SEQ ID NO: 3678 - protein, 7 aa, synthetic construct
RRGVRRH

SEQ ID NO: 3679 - protein, 7 aa, synthetic construct
RRGVRRD

SEQ ID NO: 3680 - protein, 7 aa, synthetic construct
RRGVRRE
